United States Patent Application Publication US 2019/0002960 A1 - sequence listing, part 5

SEQ ID NO: 5 - DNA, 2846546 bp, Staphylococcus aureus subsp. aureus 11819-97 (residues 1-1,423,273 of 2,846,546)
cgattaaagatagaaatacacgatgcgagcaatcaaatttcataacatcaccatgagtttggtccgaagcatgagtgtttacaatgtttgaataccttatacagttcttatacatactttataaattatttcccaagctgttttgatacactcactaacagatattctatagaaggaaaagttatccacttatgcacatttatagttttcagaattgtggataattagaaattacacacaaagttatactatttttagcaacatattcacaggtatttgacatatagagaactgaaaaagtataattgtgtggataagtcgtccaactcatgattttataaggatttatttattgatatttacataaaaatactgtgcataactaataagcaggataaagttatccaccgattgttattaacttgtggataattattaacatggtgtgtttagaagttatccacggctgttatttttgtgtataacttaaaaatttaagaaagatggagtaaatttatgtcggaaaaagaaatttgggaaaaagtgcttgaaattgctcaagaaaaattatcagctgtaagttactcaactttcctaaaagatactgagctttacacgattaaagatggtgaagctatcgtattatcgagtattccttttaatgcaaattggttaaatcaacaatatgctgaaattatccaagcaatcttatttgatgttgtaggctatgaagttaaacctcactttattactactgaagaattagcaaattatagtaataatgaaactgctactccaaaagaaacaacaaaaccttctactgaaacaactgaggataatcatgtgcttggtagagagcaattcaatgcccataacacatttgacacttttgtaatcggacctggtaaccgctttccacatgcagcaagtttagctgtagccgaagcaccagccaaagcgtacaatccattatttatctatggaggtgttggtttaggaaaaacccatttaatgcatgccattggtcatcatgttttagataataatccagatgccaaagtgatttacacatcaagtgaaaaattcacaaatgaatttattaaatcaattcgtgataacgaaggtgaagctttcagagaaagatatcgtaatatcgacgtcttattaatcgatgatattcagttcatacaaaataaagtacaaacacaagaagaatttttctatacttttaatgaattgcatcagaataacaagcaaatagttatttcgagtgatcgaccaccaaaggaaattgcacaattagaagatcgattacgttcacgctttgaatgggggctaattgttgatattacgccaccagattatgaaactcgaatggcaattttgcagaagaaaattgaagaagaaaaattagatattccaccagaagctttaaattatatagcaaatcaaattcaatctaatattcgtgaattagaaggtgcattaacacgtttacttgcatattcacaattattaggaaaaccaattacaactgaattaactgctgaagctttaaaagatatcattcaagcaccaaaatctaaaaagattatcatccaagatattcaaaaaattgtaggccagtactataatgttagaattgaagatttcagtgcaaaaaaacgtacaaagtcaattgcatatccgcgtcaaatagctatgtacttgtctagagagcttacagatttctcattacctaaaattggtgaagaatttggtgggcgtgatcatacgaccgtcattcatgctcatgaaaaaatatctaaagatttaaaagaagatcctatttttaaacaagaagtagagaatcttgaaaaagaaataagaaatgtataagtaggaaactttgggaaatgtaatctgttatataacagcactaataataactgtcattttttacatttctatatactaatgtggcaagatgagcaaaactcattttgtggataatgtttaaaagtcatacacaccatacacaagttatcaacatgtgtataacttcgccaaatctatgtttttacgacttatccaccaatccacagcacctactactattactaagaacttaaaacctatataattatatataaacgactggaaggagttttaattaatgatggaattcactattaaaagagattattttattacacaattaaatgacacattaaaagctatttcaccaagaacaacattacctatattaactggtatcaaaatcgatgcgaaagaacatgaagttatactaactggttcagactctgaaatttcaatagaaatcactattcctaaaactgtagatggcgaagatattgtcaatatttcagaaacaggctcagtagtacttcctggacgattctttgttgatattataaaaaaattacctggtaaagatgttaaattatctacaaatgaacaattccagacattaattacatcaggtcattctgaatttaatttgagtggcttagatccagatcaatatcctttattacctcaagtttctagagatgacgcaattcaattgtcggtaaaagtacttaaaaacgtgattgcacaaacgaattttgcagtgtccacctcagaaacacgcccagtactaactggtgtgaactggcttatacaagaaaatgaattaatatgcacagcgactgactcacaccgcttggctgtaagaaagttgcagttagaagatgtttctgaaaacaaaaatgtcatcattccaggtaaggctttagctgaattaaataaaattatgtctgacaatgaagaagacattgatatcttctttgcttcaaaccaagttttatttaaagttggaaatgtgaactttatttctcgattattagaaggacattatcctgatacaacacgtttattccctgaaaactatgaaattaaattaagtatagacaatggggagttttatcatgcgattgatcgtgcctctttattagcgcgtgaaggtggtaataacgttattaaattaagtacaggtgatgacgttgttgaattgtcttctacatcaccagaaattggtactgtaaaagaagaagttgatgcaaacgatgttgaaggtggtagcctgaaaatttcattcaactctaaatatatgatggatgctttaaaagcaatcgataatgatgaggttgaagttgaattcttcggtacaatgaaaccatttattctaaaaccaaaaggtgacgactcggtaacgcaattaattttaccaatcagaacttactaaaaataaatataaataaaggatgacgtgattaattaaaacgtcatcctttattttttggcaaaaataattctagatgcgtatgtaaaataaatttgacagcattttaaacagcaaataaaagacgccaattaaatttatgacaaatgtatccaaaatttaataagtgtgcttatatgccctttaaatttaaaattttaatagtcaataacaagttgaatataaaagttaaacgccgttaaatagcgttaaaaaattgaaaatgacagtattgccaaaaaataagaattaattatttatatgtaaacggtttctacctctattttaaatgaaatttgtgacaaaaaaaggtataatatattaatgacatacaaagaaatggagtgattattttggttcaagaagttgtagtagaaggagacattaatttaggtcaatttctaaaaacagaagggattattgaatctggtggtcaagcaaaatggttcttgcaagacgttgaagtattaattaatggagtgcgtgaaacacgtcgcggtaaaaagttagaacatcaagatcgtatagatatcccagaattacctgaagatgctggttctttcttaatcattcatcaaggtgaacaatgaagttaaatacactccaattagaaaattatcgtaactatgatgaggttacgttgaaatgtcatcctgacgtgaatatcctcattggagaaaatgcacaaggaaagacaaatttacttgaatcaatttataccttagctttagcaaaaagtcatagaacgagtaatgataaggaactcatacgttttaatgctgattatgctaaaatagaaggtgagcttagttatagacacggcacgatgccattaacaatgtttataactaaaaaaggtaaacaagtcaaagtgaatcacttagagcaaagtcgtctaactcaatatattggacaccttaatgtggttctatttgcgccagaagatttgaatattgtaaaaggctctcctcaaataagacgacgctttatagatatggagttgggccaaatttctgctgtttacttaaatgatttagctcaataccaacgtattttaaagcaaaagaataattacttaaagcagttacaattaggccaaaaaaaggacttaacaatgttggaagtattaaatcagcagtttgctgaatatgcaatgaaagtaactgataaacgtgcacattttattcaagagctagagtcgttagctaaaccgattcatgctggtatcacaaatgataaagaagcgttgtcgctgaattatttacctagtcttaaatttgattatgctcaaaatgaagcggcacgacttgaagaaattatgtctattcttagcgataatatgcaaagagaaaaagaacgaggcattagcttattcggaccacatcgagatgatataagttttgatgtgaatggcatggatgctcaaacatatggttctcaaggacagcaacgtacaacggctttgtccattaaattagctgaaattgagttaatgaatatcgaagttggggaatatcccgtcttattattagatgatgtactcagtgaattagatgattcgcgtcaaacgcatttattaagtacgattcagcataaagtacaaacatttgtcactacgacatctgtagatggtattgatcatgaaatcatgaataacgctaaattgtatcgtattaatcaaggtgaaattataaagtaacagaaagcgatggtgactgcattgtcagatgtaaacaacacggataattatggtgctgggcaaatacaagtattagaaggtttagaagcagtacgtaaaagaccaggtatgtatataggatcgacttcagagagaggtttgcaccatttagtgtgggaaattgtcgataatagtatcgatgaagcattagctggttatgcaaataaaattgaagttgttattgaaaaagataactggattaaagtaacggataacggacgtggtatcccagttgatattcaagaaaaaatgggacgtccagctgtcgaagttattttaactgttttacatgctggtggtaaattcggcggtggcggatacaaagtatctggtggtttacatggtgttggttcatcagttgtaaacgcattgtcacaagacttagaagtatatgtacacagaaatgagactatatatcatcaagcatataaaaaaggtgtacctcaatttgacttaaaagaagttggcacaactgataagacaggtactgtcattcgttttaaagcagatggagaaatcttcacagagacaactgtatacaactatgaaacattacagcagcgtattagagagcttgctttcttaaacaaaggaattcaaatcacattaagagatgaacgtgatgaagaaaacgttagagaagactcctatcactatgagggcggtattaaatcgtacgttgagttattgaacgaaaataaagaacctattcatgatgagccaatttatattcatcaatctaaagatgatattgaagtagaaattgcgattcaatataactcaggatatgccacaaatcttttaacttacgcaaataacattcatacgtacgaaggtggtacgcatgaagacggattcaaacgtgcattaacgcgtgtcttaaatagttatggtttaagtagcaagattatgaaagaagaaaaagatagactttctggtgaagatacacgtgaaggtatgacagcaattatatctatcaaacatggtgatcctcaattcgaaggtcaaacgaagacaaaattaggtaattctgaagtgcgtcaagttgtagataaattattctcagagcactttgaacgatttttatatgaaaatccacaagtcgcacgtacagtggttgaaaaaggtattatggcggcacgtgcacgtgttgctgcgaaaaaagcgcgtgaagtaacacgtcgtaaatcagcgttagatgtagcaagtcttccaggtaaattagccgattgctctagtaaaagtcctgaagaatgtgagattttcttagtcgaaggggactctgccggagggtctacaaaatctggtcgtgactctagaacgcaggcgattttaccattacgaggtaagatattaaatgttgaaaaagcacgattagatagaattttgaataacaatgaaattcgtcaaatgatcacagcatttggtacaggaatcggtggcgactttgatctagcgaaagcaagatatcacaaaatcgtcattatgactgatgccgatgtggatggagcgcatattagaacattgttattaacattcttctatcgatttatgagaccgttaattgaagcaggctatgtgtatattgcacagccaccgttgtataaactgacacaaggtaaacaaaagtattatgtatacaatgatagggaacttgataaacttaaatctgaattgaatccaacaccaaaatggtctattgcgcgatacaaaggtcttggagaaatgaatgcagatcaattatgggaaacaacaatgaaccctgagcaccgcgctcttttacaagtaaaacttgaagatgcgattgaagcggaccaaacatttgaaatgttaatgggtgacgttgtagaaaaccgtagacaatttatagaagataatgcagtttatgcaaacttagacttctaagcgctgtgaactgaacttttgaaggaggaactcttgatggctgaattacctcaatcaagaataaatgaacgaaatattaccagtgaaatgcgtgaatcatttttagattatgcgatgagtgttatcgttgctcgtgcattgccagatgttcgtgacggtttaaaaccagtacatcgtcgtatactatatggattaaatgaacaaggtatgacaccggataaatcatataaaaaatcagcacgtatcgttggtgacgtaatgggtaaatatcaccctcatggtgactcatctatttatgaagcaatggtacgtatggctcaagatttcagttatcgttatccgcttgttgatggccaaggtaactttggttcaatggatggagatggcgcagcagcaatgcgttatactgaagcgcgtatgactaaaatcacacttgaactgttacgtgatattaataaagatacaatagattttatcgataactatgatggtaatgaaagagagccgtcagtcttacctgctcgattccctaacttgttagccaatggtgcatcaggtatcgcggtaggtatggcaacgaatattccaccacataacttaacagaattaatcaatggtgtacttagcttaagtaagaaccctgatatttcaattgctgagttaatggaggatattgaaggtcctgatttccctactgctggacttattttaggtaagagtggtattagacgtgcatatgaaacaggtcgtggttcaattcaaatgcgttctcgtgcagttattgaagaacgtggaggcggacgtcaacgtattgttgtcactgaaattcctttccaagtgaataaggctcgtatgattgaaaaaattgcagagctcgttcgtgacaagaaaattgacggtatcactgatttacgtgatgaaacaagtttacgtactggtgtgcgtgtcgttattgatgtgcgtaaggatgcaaatgctagtgtcattttaaataacttatacaaacaaacacctcttcaaacatcatttggtgtgaatatgattgcacttgtaaatggtagaccgaagcttattaatttaaaagaagcgttggtacattatttagagcatcaaaagacagttgttagaagacgtacgcaatacaacttacgtaaagctaaagatcgtgcccacattttagaaggattacgtatcgcacttgaccatatcgatgaaattatttcaacgattcgtgagtcagatacagataaagttgccatggaaagcttgcaacaacgcttcaaactttctgaaaaacaagctcaagctattttagacatgcgtttaagacgtctaacaggtttagagagagacaaaattgaagctgaatataatgagttattaaattatattagtgaattagaagccatcttagctgatgaagaagtgttattacagttagttagagatgaattgactgaaattagagatcgttttggtgatgatcgtcgtactgaaatccaattaggtggatttgaagatttagaagatgaagatctcattccagaagaacaaatagtaattactttgagccataataactacattaaacgtttgccggtatctacatatcgtgctcaaaaccgtggtggtcgtggtgttcaaggtatgaatacattggaagaagattttgtcagtcaattggtaactttaagtacacatgaccatgtattgttctttactaacaaaggtcgtgtatacaaacttaaaggttatgaagtgcctgagttatcaagacagtctaaaggtattcctgtagtgaatgctattgaacttgaaaatgatgaagtcattagtacaatgattgctgttaaagaccttgaaagtgaagacaacttcttagtgtttgcaactaaacgtggtgtcgttaaacgttcagcattaagtaacttctcaagaataaatagaaatggtaagattgcgatttcgttcagagaagatgatgagttaattgcagttcgtttaacaagtggtcaagaagatatcttgattggtacatcacatgcatcattaattcgattccctgaatcaacattacgtcctttaggccgtacagcaacgggtgtgaaaggtattacacttcgtgaaggtgacgaagttgtagggcttgatgtagctcatgcaaacagtgttgatgaagtattagtagttactgaaaatggttatggtaaacgtacgccagttaatgactatcgtttatcaaatcgtggtggtaaaggtattaaaacagctacgattactgagcgtaatggtaatgttgtatgtatcactacagtaactggtgaagaagatttaatgattgttactaatgcaggtgtcattattcgactagatgttgcagatatttctcaaaatggtcgtgcagcacaaggtgttcgcttaattcgcttaggtgatgatcaatttgtttcaacggttgctaaagtaaaagaagatgcagaagatgaaacgaatgaagatgagcaatctacttcaactgtatctgaagatggtactgaacaacaacgtgaagcggttgtaaatgatgaaacaccaggaaatgcaattcatactgaagtgattgattcagaagaaaatgatgaagatggacgtattgaagtaagacaagatttcatggatcgtgttgaagaagatatacaacaatcatcagatgaagaataataaaaaataagacttccctatatgtaggggagtcttatttttatgctagaaagtaatgctttactatattcaatgattagtaatgactaactttctaattgtttcattgcgtaaggtatttcattgataagtcttgatggtggcaccacatacatatcttttgcaaggttttcgccaataaaactatgtgtatatgtggcactcataaccgcttcttttaagttatcaaattgaccgacaaagcttgtaatcataccagcaagtgtatcgcccataccaccagtcgccattgctgggctaccgattgtcaatttaaagtcttcatctttaaagaaaatttcagtaccatgttttttaagtacaacagttgcacctaaacgatcaactgcttcacgattacgctcatatgtctgttcctcaataggaataccacttaatcgttcccattctttgaggtgtggtgtaaagatcacacgacatgtaggtaattgcggtttcagtttactaaagattgtaatcgcatcgccgtctacgattaaattttgatgcggttgtatattttgtagtaggaatgtaatggcattatttcctttgaaatcaacgccaagacctggaccaattagtatactgtcagtcatttcaatcattttcgtcaacattttcgtatcattaatatcaataaccatcgcttctgggcaacgagaatgtaatgctgaatgatttgttggatgtgtagctacagtgattaaaccactaccgctaaatacacatgcacgagccgctaacataatggcaccacctaagttagcagatccaccaattaataaaattttgccataatcacctttatgtgaatcttctttgcgcttaggaatgttaatagaatttaacgtttccatagtgatataacctcccatgtaaaagccttttccgaatttattcaattttaaaaatatatagtaacttttaacaaaatgtattataaatttctgaattcattattatttgtcgttaaatacaatagaaaatactatacctgtatatgcaattcgtcaatagataaattattaaatatgcttacaacaatcttaatatcctttaacgcactacaatagtgctctgataataggttataaatgtacgtaaaaccattgtttcaataaaaatgaaaacgtatacttcaagaaggatgggttacttaatataaacaagggggtaacatatatgactttatatttagatggtgaaacactaacaattgaggatattaaatcatttttacaacaacaatcaaacattgaaattattgatgatgcgttagaacgtgtcaaaaaaagtagagcggtagttgaacgtattattgaaaatgaggaaacggtttacggtatcactacaggttttgggttatttagtgatgtacgtatagacccgacgcaatataatgaattacaagtgaatctgatacgctcacatgcctgtgggctaggtgagccattttcaaaagaagtagcattagtcatgatgattttacgattgaatacattattaaaaggtcattcaggtgccactttagaattagtgagacaattacaattttttataaatgaacgtattataccgataatcccacagcaaggctctctcggtgcatcaggagatttagcgccattatcacacttagcattagcattaattggtgaagggaaagtattgtacagaggggaagaaaaggatagtgacgatgtattaagagaattaaatagacaacctttgaaccttcaggctaaagaaggtttagcattgattaatggtacgcaagctatgacagctcaaggtgtcattagttatatagaagcagaagatttaggttaccaatctgaatggattgctgcattaacgcatcagtctcttaatggcattatagatgcatatcgacatgatgtgcacgcagttcgtaattttcaagaacagattaatgtggcagcgcgtatgcgtgattggttagaaggatcaacattaacgacgcgacaagcagaaatacgtgtacaagatgcatatacgttgcgttgtataccacaaatccatggcgcgagttttcaagtattcaattatgttaaacagcaattagaatttgaaatgaatgcggctaatgataatccacttatatttgaggaagcaaatgaaacgtttgttatttcaggtggtaacttccatggacaacctattgcttttgcattagatcatcttaaattaggtgtaagtgaattagcaaacgtatcggaacgtcgtctagagcgactagtaaatcctcaattaaatggtgatttaccagcatttcttagtccagagccaggattgcaaagtggcgcgatgattatgcaatatgctgctgcaagtctcgtttctgaaaataaaactttagcgcatccagcgagtgttgattctatcacttcatctgcgaaccaagaagatcacgtatctatgggaactacagctgctagacatggttatcaaattattgaaaatgcaagacgtgtgttggcaatcgaatgtgttattgcattacaagcagcagagttgaaaggtgtcgaaggattatcaccaaaaacacgtcgcaagtatgatgagtttcgaagtatcgtgccatccattacacatgatcgtcaatttcataaagatattgaagcggttgcacagtatttaaagcaatcaatttatcacacgactgcatgtcactaaatcgacatgagtgatgtttgaaatcgttacttgaaaaagcaaatatagtttgctatattaaaattaacttaataagacattgttcgtaggacaagtaatatatagtgttcgatatcagagagcttgtggttagtgtgaacaagaatcaacatatatatgaatctacctacttatttaaaagaacaatcggtgataaccgttattttagtgaagtgcaatttaggtttagtgtatctttataacttaaattgttaaatagggtggcaacgcgtagaccacgtcccttgtagggatgtggtctttttttattttctaaaaaataaagacgtacgtcattccataataaatgataattatttgggaaaggatgaaggttaatgttagacattagattattcagaaatgagcctgacacagttaagagcaaaattgaattacgtggagatgatccaaaagttgtagatgaaattttagaattggatgagcaacgacgtaaattaattagtgcaacagaagaaatgaaagcacgtcgtaataaagtaagcgaagaaatcgcattaaaaaaacgtaataaagaaaatgctgatgatgtgattgctgaaatgcgcacattaggtgacgatattaaagaaaaagatagtcaattaaatgaaattgataataaaatgacaggtatcctttgtcgtattccaaatttaataagtgatgatgtacctcaaggtgaatctgatgaagataacgttgaagttaaaaagtggggtacaccacgtgagttttcatttgaaccaaaagcacattgggatattgtagaagaattgaaaatggctgattttgatcgtgcagcaaaagtttcaggcgcgcgttttgtatatttaacaaatgaaggtgcgcaattagagcgtgctttaatgaactatatgattacaaaacatacaacacaacatggttatacagaaatgatggtaccacagcttgtgaacgcagatacaatgtatggtacaggtcaattacctaaatttgaagaagatttatttaaagtagaaaaagaaggattatatacaattccaactgctgaagtaccattaacgaatttctaccgtaatgaaattattcaaccaggtgtacttcctgaaaaattcactggtcaatctgcatgtttccgtagtgaagcaggatcagcaggtagagatacaagaggattaattcgtttacatcaattcgataaagtggaaatggtacgttttgaacaacctgaagattcatggaatgctttagaagaaatgacaacaaacgcagaagcaattctagaagagttaggtttaccatatcgtcgtgttattttatgtacaggtgatattggatttagtgcaagcaaaacatatgatttagaagtttggttaccaagctacaatgattataaagaaattagttcatgctcaaactgtacggatttccaagcgcgtcgtgctaacatccgcttcaagcgtgacaaagcagctaaaccagaattagcacatacattaaatggtagtggtttagcagttggacgtacatttgctgctattgttgaaaattaccaaaatgaagatggaacagtaacaattccagaagcattagtaccatttatgggtggtaaaacacaaatttcaaaaccagttaaataaaggctttagctacaagctttaaaaagtatatatctacgtatacttaaagcaagggcaagatactttaaataatattttaaaaagtggtgacgaagctgtcgccactttttttgtgctgtaaaagtataatagtgagccaatgcacataacaacaataaattaagtttgtggtttaatggggtgaacgcatttcattatagcaacaatacgggataattatgatgaactaaaacaatctaaaacgtaacaagtttgagcatcactaatataggaaaggaagcgataaaatactgatttcgttgatatgtagtatgagttatatcgatggagtagggtagggggaggggatgattataaggaagtggtacatgaatcaatatcccagactcatcatcagatataaaaatttataaaattgatacttaaaaacaactacaaatccatagaaaatatggaggtagtcttaaataaaaaattgaaaattctcaaaaataaaaagttaatatgaagctgactaaagactccggtatgtctaacctcagacaaactgatgtctaatgttattgcttagggtatagaactgtattagactaggtatattattttttcgtaattatataaatataaagtggcaaaggaggtaattgagatgacaacacatttaagttttagacaaggcgtgcaagagtgtatcccaacattattgggttatgccggtgttggtatttcatttggtattgtggcttcgtctcaaaactttagtattttagaaattgtcttgttatgtcttgttatatatgccggtgctgcgcaatttattatgtgcgcgttgtttatagcaggtacacctatatcagcgattgtactaactgtatttatcgtaaattcaagaatgttccttttaagtatgtcgcttgcaccaaacttcaagacatatgggttttggaaccgtgttggattaggttcattagtaactgacgaaacgtttggcgtcgccattacaccttatttaaaaggagaagctatcaatgatcgttggatgcatggtcttaacatcacagcatatttattttgggcaatttcatgtgtagctggggctttatttggcgaatatatctcaaatccgcaaacgctagggttagattttgctatcacggctatgtttatctttttggccattgcgcaatttgaatcaattactaaatcgcgattaagaatttacatagtactcattattgccgtcatagtaatgatgttatcgctaagtatgtttatgccttcatatctagcaatattaattgcagccacaatttcagcagcgttaggagtgatgatggaacgatgataactcatatgaacatgttaatacttattttattgtgtggtatcgtaacgctattaattcgaattataccttttatcatgatttcaaaagtgcaattgcctgatgtcgtggttcgatggctatcatttatcccaatcacactatttacggcacttgtcatagacagcattattcaacagacgcctcatggtgaggggtatacattaaacatcccttacattatcgcgctcattccgacggttattttatctataatcacgcgtagtttaactattacaattattagtgggattgttatcatggcagcattacgatttttcttttaaaaataactgaaaatcattgaacagatatttaaacttaggtaaactgttagtaatcagaaaattctgatatacaaatcgtctatgttaagattgggaatcgtgtatacgtaagcgatttggctaacgcatgacaatgataacaacattttaaatgataaagtaattcatcactgaatctcaactaacacataacaatttcatatttcttattgtgagaagttgagggacttggccctgtgatacttcagcaaccgactttatagcacggtgctaaaaccaacgagttactcgaatgataagtataaagacttcttacttttcaatagggtgagaagttttttgtttaaggaggaaagaacaatgacaaattacacagtagatactttaaatttagggaaatttattacagaatctggggaagtcatagataacttgcgtttgagatatgagcatgtcggttatcatggacaaccattagttgtagtttgtcatgcattaactggcaatcatttaacatatggaacagatgattatccgggttggtggcgagaaattattgatgggggatatatacccattcacgattatcaatttttaacatttgatgttattggtagtcctttcggttcaagctcacctttaaacgacactcattttcctaaaaaattaacattaagagatattgtcagagcgaatgaacgaggtatacaagcccttggttatgacaagattaatattttaatagggggaagtcttggaggaatgcaagcaatggaactactttacaatcaacagtttgaagtagataaagccattatccttgctgcaacaagccgaacatcatcttatagtagagcttttaatgaaattgcaaggcaagccattcatcttggtggtaaggaaggtctaagtattgcacgccaattaggttttttgacatatcgatcatcaaaaagttatgatgaacgtttcacgccggatgaagtagtcgcataccaacaacatcaaggtaataaatttaaagaacattttgatttgaattgttatctgacactgctagatgtattggatagtcacaacattgaccgaggccgcacagacgtaacgcatgtttttaaaaatttagaaacaaaagtgttaacgatggggttcatagatgatttgctatatccggacgatcaagttcgtgcattaggtgaacgttttaaatatcatcgtcatttcttcgtgcctgataatgttgggcatgatggattcctactaaactttagtacctgggcacctaacttatatcatttcttaaatttaaagcattttaagcgtaagtagtaatatatattttttttcaaaaaatgaagccactaaatcacagttatcatattcaaaaacatctagagtacatgagagtggtaatgaattgtaaatctaaatcaagcttgattgctatgtagtgggattaaataatcatgttgaaaatgaaagcacacaaaagcgattcaaatgagtatgttaattacttataaaacatgaaagttattattcaattaaatgaaatagaagcatacaatctataaattgttaatttccattaaagaggttaaaataatagctatagttaaaaatatgggagtggcttatgtgttttcaaaaatacaacctaaagcaacaataattgcaacgattacgttggtatttgtcgctttagctttatatctagtgcctggtttaggactaatatttgcattatttgcaaccataccaggtatcgttttatggaataaatcaatacaatctttcgggattagtgcacttattacagtaattataacaactgttttaggtaatactttcgttttaagtgccatcatattagtcttaattgcaagtttaattattggtcaattgctcaaagaaagaacgtctaaagaaagaatattatacgtaacaacagtagcgatgagcttaatttcattaatcgcttttatgttactacaaacattcggaagaattccaccatcagcgagcatagtaaaacctttcaagcaaacattacatgaagcgattacgatgagcggtgccgatgcgaatatgacccaaatattagaagaagggtttagacaagcgaccgttcaattaccaggtttcatcattatcattacatttttaatcgtcttaattaacttaatcgttacatttccgattttacgaaaatttaaaatcgctacacctgtatttaagccacttttcgcgtggcaaatgagcggtattttattatggatatacattattgttatcatatgtttattatttacaggtcaaccgagtgtgttccagagcattcttttaaacttccaacttgtgttatcattagtaatgtatattcaaggtttaagtgttattcatttctttggtaaagcgaaaggtttgccgaatgcagtaacgattttactattgattatcggtacaatactgacacctacgacacatattgtaggactacttggtgttatcgatttaagtttgaatttgaagcgaatcatgaaaaataattctaaaaagtgaatagaggtggaataatgaatcggcagtccactaagaaagctttactaataccatttgtcatcatgatcatcacagcaattgttttaatgggtgtatggtttatctttaatagtcttatagcattaattgcatctatcgttcttgtcgtgatgattattgttagcatcattttattcagacaagctttaatgaaaatggatagttatgtagatggtttgagtgctcaaatttcaacaacaaataataaagcaatcaaacatttaccaattggtatcattgttttagatgaaaatgatcacatcgaatgggttaaccaatttatgacagatcatatggaagcaaatgtcatttctgaatctgtaaatgaagtatttccaaacattttaaagcaattagatagagtgaaatccgttgaaatagaatataatcagtatcatttccaagtacgttattctgagaatgatcactgcctctatttctttgatataactgaacaagtacaaacaaatgaactatatgaaaattctaaaccaatcattgcgacattatttttagataactacgatgagattactcaaaatatgaatgatacgcagcgttcggaaatcaactcaatggtaacgcgtgtcattagtcgatgggcaactgagtataatatattctttaaaaggtatagttccgatcaattcgtagcctatttaaatcaaaaaatattagctgacttagaagaatctaaatttgatatcttgagtcaattacgtgaaaaaagtgttggttatcgtgcccaattaacattaagtatcggtgttggtgaaggcactgaaaatttaatcgacttaggtgaattatcacaatcaggcctagacttagcattaggacgcggtggcgaccaagttgcaattaaaagtattaatggtaatgtgcgcttctatggcggtaagactgacccgatggagaaacgtactcgtgtaagagcacgtgtgatctcacatgcgttaaaagatatccttgcagagggtgacaaagtcattatcatgggacataaacgtcctgacttagatgcaattggtgcagcaatcggtgtgtctagatttgcaatgatgaataatttagaagcatacatcgtattaaatgagactgacattgatccaacattacgacgcgtgatgaacgaaatagataaaaagccagagttaagagagcgatttattacatcagatgatgcttgggatatgatgacatctaagacaaccgtagtgattgttgatacgcataaaccggaactggttttagatgaaaatgtcttaaataaagcaaaccgtaaagttgttatcgatcatcatagacgtggtgaaagcttcatctctaatccattgttgatatatatggaaccatacgcaagttcgacagctgaattggtaacagagttactggaatatcaaccaacagaacaacgtttaacacgtcttgaatcaacagtgatgtatgcaggtattattgtagatacaagaaactttacattacgaacaggatcaagaacattcgatgcagcgagttatttacgtgcacatggtgcagatacgattttaacgcaacatttcttaaaagatgatgtggatacttacattaatcgatctgaattaattcgaactgtaaaagttgaagataatggcatagccattgcgcatggttcagacgataaaatttatcatccagtaacagttgcacaagcagcagatgaactgttaagtttagaaggtattgaagcatcatatgttgttgcgagacgtgaagataatctgattggtatatctgcgcgttcactcggttcagtaaatgtccagttaacaatggaagcacttggtggcggtggacatttaaccaatgcggcaacacaacttaaaggtgtgacagtcgaagaggcgatagcacaattacaacaagcaattacagaacaattaagtaggagtgaagatgcatgaaagtaatttttacacaagatgttaaaggtaaaggtaaaaaaggtgaagttaaagaagtaccagtaggttatgcaaataacttcttattgaaaaagaattatgctgtagaagcaacaccaggtaaccttaaacaattagagttacagaaaaaacgtgcaaaacaagaacgccaacaagaaattgaagatgctaaagcattaaaagaaacgttatcaaacattgaagttgaagtatcagcaaaaactggtgaaggtggtaaattgtttgggtcagtaagtacaaaacaaattgccgaagcactaaaagcacaacatgatattaaaattgataaacgtaaaatggatttaccaaatggaattcattccctaggatatacgaatgtacctgttaaattagataaagaagttgaaggtacaattcgcgtacacacagttgaacaataaagttggattgaaataagaggtgtaaccattcatggatagaatgtatgagcaaaatcaaatgccgcataacaatgaagctgaacagtctgtcttaggttcaattattatagatccagaattgattaatactactcaggaagttttgcttcctgagtcgttttataggggcgcccatcaacatattttccgtgcaatgatgcacttaaatgaagataataaagaaattgatgttgtaacattgatggatcaattatcgacggaaggtacgttgaatgaagcgggtggcccgcaatatcttgcagagttatctacaaatgtaccaacgacgcgaaatgttcagtattatactgatatcgtttctaagcatgcattaaaacgtagattgattcaaactgcagatagtattgccaatgatggatataatgatgaacttgaactagatgcgattttaagtgatgcagaacgtcgaattttagagctatcatcttctcgtgaaagcgatggctttaaagacattcgagacgtcttaggacaagtgtatgaaacagctgaagagcttgatcaaaatagtggtcaaacaccaggtatacctacaggatatcgagatttagaccaaatgacagcagggttcaaccgaaatgatttaattatccttgcagcgcgtccatctgtaggtaagactgcgttcgcacttaatattgcacaaaaagttgcaacgcatgaagatatgtatacagttggtattttctcgctagagatgggtgctgatcagttagccacacgtatgatttgtagttctggaaatgttgactcaaaccgcttaagaacgggtactatgactgaggaagattggagtcgttttactatagcggtaggtaaattatcacgtacgaagatttttattgatgatacaccgggtattcgaattaatgatttacgttctaaatgtcgtcgattaaagcaagaacatggcttagacatgattgtgattgactacttacagttgattcaaggtagtggttcacgtgcgtccgataacagacaacaggaagtttctgaaatctctcgtacattaaaagcattagcccgtgaattagaatgtccagttatcgcattaagtcagttatctcgtggtgttgaacaacgacaagataaacgtccaatgatgagtgatattcgtgaatctggttcgattgagcaagatgctgatatcgttgcgttcttataccgtgatgattactataaccgtggcggcgatgaagatgatgacgatgatggtggttttgagccacaaacgaatgatgaaaacggtgaaatagaaatcatcattgctaagcaacgtaacggtccaacaggcacagttaagttacactttatgaaacaatataataaatttacagatatcgattatgcacatgctgatatgatgtaaaaaaagtttttccgtacaataatcattgcgatgataaaattgtacggtttttattttgttctgaacgggttgatatatgttaagtttgtgtattgaaagtgatggattagtactgtcaacgcctctgttaaagggtttttaggacgttgaagacgatttgttaaaatgatttttcttttaaaaaggctgaaaatcaatgttcgatttttatttgcattatggtctcgatattggtagaatatcaaatggttaaatgagaaaaacttggaggtgctcacatgtcatcaatcgtagtagttgggacacaatggggagacgaaggaaaaggaaaaataacggatttcttggcagaacagtcagatgttatcgcgcgtttttcaggtggtaataatgcaggccataccattcaatttggcggagaaacatataaattacatttagtaccatctggtatcttttacaaagacaaattagcggtaatcggtaacggtgtcgttgttgatccagttgcactattgaaagaattagacggattaaatgaacgtggcattcctacaagtaatttacgtatatctaatcgtgcgcaagtgattttaccatatcacttagcacaagatgaatatgaagaacgtttacgcggtgacaataagattggtacaactaaaaaaggtatcggtccagcatatgtagacaaagttcaacgtatcggtattcgtatggcagatttacttgaaaaagaaacattcgaaagattattaaaatcaaacattgaatataaacaagcatatttcaaaggtatgtttaacgaaacatgtccatcatttgatgatatctttgaagaatactatgctgcaggtcaacgtttaaaagaatttgtaacagacacatcaaaaatcttagacgatgcatttgtagcagatgaaaaggtacttttcgaaggtgcgcaaggtgtaatgttagatatcgaccatggtacatatccattcgttacatcaagtaatccaattgcaggtaacgttactgttggtacaggtgtaggtcctacattcgtttcaaaggtaattggtgtatgtaaagcttatacatcacgtgttggtgatggtccattccctactgaattattcgatgaagatggacatcatattagagaggttggtcgtgaatacggtacaacaacaggacgtccacgtcgtgtaggttggtttgattcagttgtattacgtcactctcgtcgtgtaagtggtattacagatttatctattaactcaatcgatgttttaacaggcctagacacagtgaaaatctgtacagcttatgaattagacggtaaagaaattactgagtacccagcaaacttagatcaattaaaacgttgtaaaccaatctttgaagagttaccaggttggacagaagacgtaacaaatgtgcgtactttagaagaattacctgaaaatgcacgtaaatatttagagcgtatttcagaattatgtaatgtacaaatttctatcttctcagttggtccagatagagaacaaacaaacctattaaaagaattgtggtagaactttatataagtcatacacaatgattataaatacatgagccttctatctttattggtaggaggcttttgttatgcttgcttctgtatcgattcgattatttagataaaaaatactaacgtaaaggcgatatttgctagtcataatttagaagattagatgatatttaacgaaaattaagatgaaatacttgaatgtaagaagtctgatgtcgaaaatagctattaaaatagagtagacgtaagtgtaaatgaaagcacctaaaatagaaaaatttcaaaaatagcgtaattattataataaatagactgccaataaaatgcaatttttcacttataacattcttcaaaaaataatagcaaaattatgtaaaaaatatcttgtcatggcaagattggctgtgctataatctatcttgtgcttaagaacggctccttggtcaagcggttaagacaccgccctttcacggcggtaacacgggttcgagtcccgtaggagtcaccattttttaggtctcgtagtgtagcggttaacacgcctgcctgtcacgcaggagatcgcgggttcgattcccgtcgagaccgtacaaatgcctatccaagaggataggcatttttttgcgtttaatattatattaataaaagatatatggacgaatgataatcatattgatttatctgttcgtccattttctttaaaatgtatgaacctcaagtaacttagtggttggatatgaaagataaacgtagacaataaaatctttattagacgtacaaacatatgctactgtcaacatatttcttcgttgtgatatgccaccagtcctccataacatcaattgttaaagtaacgaataacgaataatgatatttattttctgagcaatgacgtgcaactagaagttgccattatcctaattttattattggaatagagacctcatcattgtgttaaatatcattgtcacaatccgccgtgagaaactaataaaaaatagtaatatataagtttatattggaaaatagaattaatagcttataaatggtaaattatataataggttactatacgttataagacggaaaatgcgcacaataacaaaaatagtaagcgacatcctgtgattttttacacaaacataaacgataaagaacaaaaaatgataaaataatattaatgatttaagaaaagaggtttatgcaaatggctagaaaagttgttgtagttgatgatgaaaaaccgattgctgatattttagaatttaacttaaaaaaagaaggatacgatgtttactgtgcatacgatggtaatgatgcagtcgacttaatttatgaagaagaaccagacatcgtattattagatatcatgttacctggtcgtgatggtatggaagtatgtcgtgaagtgcgcaaaaaatacgaaatgccaattataatgcttactgctaaagattcagaaattgataaagtgcttggtttagaactaggtgcagatgactatgtaacgaaaccgtttagtacgcgtgaattaatcgcacgtgtgaaagcgaacttacgtcgtcattactcacaaccagcacaagacactggaaatgtaacgaatgaaatcacaattaaagatattgtgatttatccagacgcatattctattaaaaaacgtggcgaagatattgaattaacacatcgtgaatttgaattgttccattatttatcaaaacatatgggacaagtaatgacacgtgaacatttattacaaacagtatggggctatgattactttggcgatgtacgtacggtcgatgtaacgattcgtcgtttacgtgaaaagattgaagatgatccgtcacatcctgaatatattgtgacgcgtagaggcgttggatatttcctccaacaacatgagtagaggtcgaaacgaatgaagtggctaaaacaactacaatcccttcatactaaacttgtaattgtttatgtattactgattatcattggtatgcaaattatcgggctgtattttacaaataatcttgaaaaagagctgcttgataattttaagaagaatattacgcagtacgctaaacaattagaaattagtattgaaaaagtatatgacgaaaagggctccgtaaatgcacaaaaagatattcaaaatttattaagtgagtatgccaaccgtcaagaaattggagaaattcgttttatagataaagaccaaattattattgcgacgacgaagcagtctaaccgtagtctaatcaatcaaaaagcgaatgatagttctgtccaaaaagcactatcactaggacaatcaaacgatcatttaattttaaaagattatggcggtggtaaggaccgtgtctgggtatataatatccccgttaaagtcgataaaaaggtaattggtaatatttatatcgaatcaaaaattaatgacgtttataaccaattaaataatataaatcaaatattcattgttggtacagctatttcattattaatcacagtcatcctaggattctttatagcgcgaacgattaccaaaccaatcaccgatatgcgtaaccagacggttgaaatgtccagaggtaactatacgcaacgtgtgaagatttatggtaatgatgaaattggcgaattagctttagcatttaataacttgtctaaacgtgtacaagaagcgcaggctaatactgaaagtgagaaacgtagactggactcagttatcacccatatgagtgatggtattattgcaacagaccgccgtggacgtattcgtatcgtcaatgatatggcactcaagatgcttggtatggcgaaagaagacatcatcggatattacatgttaagtgtattaagtcttgaagatgaatttaaactggaagaaattcaagagaataatgatagtttcttattagatttaaatgaagaagaaggtctaatcgcacgtgttaactttagtacgattgtgcaggaaacaggatttgtaactggttatatcgctgtgttacatgacgttactgaacaacaacaagttgaacgtgagcgtcgtgaatttgttgccaatgtatcacatgagttacgtacacctttaacttctatgaatagttacattgaagcacttgaagaaggtgcatggaaagatgaggaacttgcgccacaatttttatctgttacccgtgaagaaacagaacgaatgattcgactggtcaatgacttgctacagttatctaaaatggataatgagtctgatcaaatcaacaaagaaattatcgactttaacatgttcattaataaaattattaatcgacatgaaatgtctgcgaaagatacaacatttattcgagatattccgaaaaagacgattttcacagaatttgatcctgataaaatgacgcaagtattcgataatgtcattacaaatgcgatgaaatattctagaggcgataaacgtgtcgagttccacgtgaaacaaaatccactttataatcgaatgacgattcgtattaaagataatggcatcggtattcctatcaataaagtcgataagatattcgaccgattctatcgtgtagataaggcacgtacgcgtaaaatgggtggtactggattaggactagccatttcgaaagagattgtggaagcgcacaatggtcgtatttgggcaaacagtgtagaaggtcaaggtacatctatctttatcacacttccatgtgaagtcattgaagacggtgattgggatgaataataaggaacatattaaatctgtcattttagcgctactcgtcttgatgagtgtcgtattgacatatatggtatggaacttttctcctgatattgcaaatgtcgacaatacagatagtaagaagagtgaaacgaaacctttaacgacacctatgacagccaaaatggatacaactattacgccatttcagattattcattcgaaaaatgatcatccagaaggtacgattgcgacggtatctaatgtgaataaactgacgaaacctttgaaaaataaagaagtgaagtccgtggaacatgttcgtcgggatcataacttgatgattcctgatttgagcagtgattttacattattcgattttacgtatgatttaccgttatcaacatatcttggccaagtactgaacatgaatgcgaaagtaccaaatcatttcaatttcaatcgtttggtcatagatcatgatgctgatgataatatcgtgctttatgctataagcaaagatcgccacgattacgtaaaattaacaactacaacgaaaaatgatcattttttagatgcattagcagcagtgaaaaaagatatgcaaccatacacagatatcatcacaaacaaagatacaattgatcgtacgacgcatgtttttgcaccaagtaaacctgaaaagttaaaaacatatcgcatggtatttaacacgattagtgttgagaaaatgaatgctatactatttgacgattcaaccatcgttcgtagttcaaagagtggtgttactacttacaacaataatacaggtgtcgcaaactataacgataaaaatgaaaaatatcattataaaaacttatccgaagatgaagcaagttccagcaaaatggaagaaacgattccaggaacctttgattttattaatggtcatggtggtttcttaaacgaagacttcagattgtttagtacgaataatcagtcaggcgagctaacatatcaacgtttccttaatggttatccaacgtttaataaagaaggctctaatcaaattcaagtcacttggggtgaaaaaggcgtctttgactatcgtcgttcgttattacgcaccgacgttgttttaaacagtgaagataataaaacgttgccgaaattagagtctgtacgttcaagcttagcgaacaatagtgatattaattttgaaaaagtaacaaacatcgctatcggttacgaaatgcaggataactcagatcataatcacattgaagtgcagattaacagtgaactcgtaccgcgttggtatgtagaatatgatggcgaatggtatgtttataacgatgggaggcttgaataaatgaactggaaactgacgaagacacttttcattttcgtgtttattcttgtcaacatcgtgttagtatcgatttatgttaataaagtcaatcgctcacacattaatgaggttgagagtaacaatgaagttaattttcagcaagaagaaattaaagtaccgactagtatattgaataaatcagttaaaggtataaaattagagcaaattacggggcgttcgaaagactttagttctaaagctaagggcgattcggatttgaccacatcagatggtggaaaattattaaatgcgaacattagtcaatcggtaaaggtcagtgacaataacttaaaagatttgaaggattatgttaacaaacgtgtgttcaaaggttcagaatatcaattaagtgagattagttctggttctgtaaaatacgaacaaacgtatgataatttcccgattttgaataatagtaaagcgatgttgaactttaatatagaagataacaaagcggctagttataaacaatcaatgatggatgacattaagcccacagatggtgcagataagaagcatcaagttattggagtgagaaaagcaatcgaggcattatattataatcgttacttgaaaaaaggtgatgaagtcattaatgctagactcggttactactcagtcgtgaacgaaacgaatgttcaattgttacaaccaaactgggaaattaaagtgaagcatgacggtaaggacaaaacgaatacttactatgtcgaagcgacaaataataaccctaaaattattaatcattaatatgaatcgtaataagctagcattgcaagctcatcatatgtgagaagcagtgctagctttttgctggtacggtttattatggctgacaggcgacatttctgcgtctccaacgtgcgcatttattcatattttaagtagaaccgcattgtaaaattaacgtaactgctattttaaaaactttagtatttgtctaatcattgttataatagttaagaaattcattgcacgtgattatcgaaatttaaatataagagaccggtcgatgaactaaagttacataatagggaaggtatacaaaacagctaatatactgatagtttctgtagggaaaatcgtatatttgcactgatgtatattgcagtcatatagagaaagtgactgtttaaagagaaaggatgagccgcttgatacgcatgagtgtattagcaagtggtagtacaggtaacgccacttttgtagaaaatgaaaaaggtagtctattagttgatgttggtttgactggcaagaaaatggaagaattgtttagtcaaattaatcgtaatattcaagatttaaatggtattttagtaactcatgaacatattgatcatattaaagggttaggtgttttggcgcgtaaatatcaattgccaatttatgcgaatgaaaagacttggcaagctattgaaaagaaagatagtcgaatccctatggatcagaaattcatttttaatccttatgaaacgaaatctattgcaggttttgatgttgaatcttttaacgtgtcacatgatgcgatagatccacaattttatattttccataataactataagaagtttacgattttaacggatacgggttacgtgtctgatcgtatgaaaggtatgatacgtggcagcgatgcgtttatttttgagagtaatcatgacgtcgatatgttgagaatgtgtcgttatccatggaagacgaaacaacgtattttaggcgatatgggtcatgtatctaatgaggatgcgggccatgcgatgacggacgtgattacaggtaacacgaaacgtatttacttatcacatttatcacaagataataatatgaaagatttggcgcgtatgagtgttggtcaagtattgaacgaacacgatattgatacggaaaaagaagtattgctatgtgataccgataaagctattccaacgccaatatatacaatataaatgagagagtcaccctttaaagttccacattgctgtgagacgactttatcgggtgcttttttatgttgttgagttgaatcggcttgattgaaatgtggaaataattcgatattaaatgtaatttataaataatttacataaaatcaaacattttaatataaggattatgataatatattggtgtatgacagttaatggagggaacgaaatgaaagctttattacttaaaacaagtgtatggctcgtattgctttttagtgtgatgggattatgccatgtctcgaacgcggctgagcagcatacaccaatgaaagcacatgcagtaacaacgatagacaaaacaacaacagataagcaacaagtaccgccaacaaaggaagcggctcatcaatttggtaaagaagcggcaaccaatatatcagcacaggggacaactgatgaaataaacaataaagtaacatccaacgcattttctaacaaaccatctacagcagtttcaacaaaaggaaacgaaacgcgcgatgtagatgcacaacaaacctcaacacaaaaaccaactcacacagcaacattcacattatcaaatgctaaaacagcatcactttcaccacgaatgtttgctaccaatgcaccacaaacaacaacacataaaatattacatacaaatgatatccatggccgactagccgaagaaaaagggcgtgtcatcggtatggctaaattaaagacagtaaaagaacaagaaaagcctgatttaatgttagatgcaggagacgcattccaaggtttaccactttcaaaccagtctaaaggcgaagaaatggctaaagcaatgaatgcagtaggttatgatgctatggcagtcggtaaccatgaatttgactttggatacgatcagttgaaaaagttagagggtatgttagacttcccgatgctaagcactaacgtttataaagatgggaaacgcgcgtttaaaccatcaacgattgtaacgaaaaatggtattcgttatggaattattggcgtaacgacaccagaaacaaagacgaaaacaagacctgaaggcattaaaggcgttgaatttagagatccattacaaagtgtgacagcagaaatgatgcgtatttataaagacgtagatacatttgttgttatatctcatttaggtattgatccttcaacacaagaaacatggcgtggtgattacttagtgaaacaattaagtcaaaatccacaattgaagaaacgtattacagttattgatggtcactcacatacagtacttcaaaatggtcaaatttataacaatgatgcattggcacaaacaggtacagcacttgcgaatatcggtaagattacatttaattatcgcaatggagaggtatcgaatattaaaccgtcattgattaatgttaaagacgttgaaaatgtaacaccgaacaaagcattagctgaacaaattaatcaagctgatcaaaaatttagagcacaaacagcagaggtaattattccaaacaataagattgatttcaaaggagaaagagatgacgttagaacgcgtgaaacaaatttaggaaacgcgattgcagatgctatggaagcatatggcgttaagaatttctctaaaaagactgactttgccgtgacaaatggtggaggtattcgtgcctctatcgcaaaaggtaaggtgacacgctatgatttaatctcagtattaccatttggaaatacgattgcgcaaattgatgtaaaaggttcagacgtctggacggctttcgaacatagtttaggtgcaccaacaacacaaaaagacggtaagacagtgttaacagcgaatggcggtttattacatatctctgattccattcgtgtttactatgatatgaataaaccatctggcaaacgaattaacgctattcaaattttaaataaagagacaggtaagtttgaaaatattgatttaaaacgtgtatatcacgtaacgatgaatgacttcacagcatcaggtggagacggatatagtatgttcggcggacctagagaagaaggtatttcattagatcaagtactagcaagttatttaaaaacagctaacttagctaagtatgatacgacagaaccacaacgtatgttattaggtaaaccagcagtaagtgaacaaccagctaaaggacaacaaggtagcaaaggtagtgagtctggtaaagatgcacaaccaattggtgacgacaaagtgatggatccagcgaaacaaccagcttcaggtaaagttatgttgttaccagcgcatagaggaactgttagtagcggtacagaaggttctggtcgcacattagaaggagctactgtatcaagcaagagtgggaaccgattggttagaatgtcagtgcctaaaggtagcgcgcatgagaaacagttaccaaaaactggaactaatcaaagttcaagcccagcagcgatgtttgtattagtagcaggtataggtttaatcgcgactgtacgacgtagaaaagctagctaaaatatattaaaaacaatactactgtatttcttaaataagaggtacggtagtgtttttttatggaaaaaagctataaacgttgataaacatgggatataaaaacggggataagtaataagacatcaaggtatttatccacagaaatggggatagttatccagaattgtgtacaatttaaagagaaatacccacaacgcccacagagttatccacaaatacacaagttatacactgaaaaatgggcataaatgtcagaaaaatatcaaaaactgcaaaaaatattgttataataagagggaacagtgtgaacaagttaataacttgtggataactggcgagttgataacaatttggaggaccaaacgacatgaaaatcaccattttagctgtagggaaactaaaagagaaatattggaagcaagccatatcagaatatgaaaaacgtttaggcccatacaccaagatagacatcatagaagttccagacgaaaaagcaccagaaaatatgagcgacaaagaaatcgagcaagtaaaagaaaaagaaggccaacgaatactagccaaaatcaaaccacaatcaacagtcattacattagaaatacaaggaaagatgctatcttccgaaggattggctcaagaattgaaccaacgcatgacccaagggcaaagcgactttgtattcgttattggcggatcaaacggcctgcacaaggacgtcttacaacgcagtaactatgcactatcattcagcaaaatgacatttccacatcagatgatgcgggttgtgttaattgagcaagtgtatagagcatttaagattatgcgtggggaagcatatcataaatgatgcggttttttcagccgcttcataaagggattttgaatgtatcagaacatatgaggtttatgtgaattgctgttatgtttttaagaagcttatcataagtaatgaggttcatgatttttgacatagttagcctccgcagtctttcatttcaagtaaataatagcgaaatattctttatactgaatacttatagtgaagcaaagttctagctttgagaaaattctttctgcaactaaatatagtaaattacggtaaaatataaataagtacatattgaagaaaatgagacataatatattttataataggagggaatttcaaatgatagacaactttatgcaggtccttaaattaattaaagagaaacgtaccaataatgtagttaaaaaatctgattgggataaaggtgatctatataaaactttagtccatgataagttacccaagcagttaaaagtgcatataaaagaagataaatattcagttgtagggaaggttgctactgggaactatagtaaagttccttggatttcaatatatgatgagaatataacaaaagaaacaaaggatggatattatttggtatatctttttcatccggaaggagaaggcatatacttatctttgaatcaaggatggtcaaagataagtgatatgtttccgcgggataaaaatgctgcaaaacaaagagcattaactttatcttccgaactcaataaatatattacatcaaatgaatttaatactggaagattttattacgcagaaaataaagattcatcttatgatttaaaaaatgattatccatcaggatattctcatggatcaataagattcaaatattatgatttgaatgaaggattcacagaagaagatatgctagaggatttaaagaaatttttagaactatttaatgaattagcttcaaaagttacaaaaacatcctatgatagcttggtcaatagcatagacgaaatacaggaagacagcgaaattgaagaaattagaacagcacaaaaagataagacactcaaggaagtggaagcacctaaaggaataattccaaaatataaaaaaggtgtatcaaagactactaaaaatgattcagaaattgaaaaatcaaataaagagaataaattaaccggtaaagttggagaaaaattagcgctaaattactttaatgagctaattgataataaaatagacgaagataagaaagaacagtttaggaatattttaaatgataatccaggctctcaacacggtcatggctatgatttagtagcttttgatccaacaaatacagataaagctgtagaaaaatttattgaaattaaaacatctacatcttctagtattgaggaaccattttttatgtcgctaaatgaaatgtttgctatgaaagaatataagcagaaatatttaatattaagaatatttaatgtttccggtaaagaaccacaattttattttatagatccatatgcaaattattctgaatttaaagatgtagatgatctcattgacaaagtatttaatgtagaagctattcagtataaagtttttggcgaaaaatgattacttgaacaagagctaaaataaaattgtgatctaataaaaatagaaactgtaatttaaataaaactttctaaataagctaactgataaaaaatcagtttgtccacagtctgaaacaagattcctatattctttaggaatcttgttttttctatttttatggtgataaagagcagataagataatgtgtaataatcacaaaaaagttaaatattttaaggcttgtttaattattaatgattttatatataaagagcagtataataaagttgttaatatattatgaataatattcaagtaattttattgttttttaatttgtcgatatttaagttgagttaaatttaaagggtgtaatttgttttacaatgatgaagataattagtctatcaaaataaaggggttgggactgttatgagtgataatttgtcattattcattgactatatcaatgataatataatctatggtagtgaaatcaaacgggagaaattagagaatttatttaatcaatttgctataaaaaatgttgaaaagaacattgtctatgatgaactgaaatctttagatattacaatcattgagtcacaggattcatataaaaataaattgaagagattattttcggttctgttgcaaagtaaaaaaatatagctaaccactaatttatcatgtcagtgttcgcttaacttgctagcatgatgctaatttcgtggcatggcgaaaatccgtagatctgaagagacctgcggttctttttatatagagcgtaaatacattcaataccttttaaagtattctttgctgtattgatactttgataccttgtctttcttactttaatatgacggtgatcttgctcaatgaggttattcagatatttcgatgtacaatgacagtcaggtttaagtttaaaagctttaattactttagccattgctaccttcgttgaaggtgcctgatctgtaattaccttttgaggtttaccaaattgtttaatgagacgtttgataaacgcatatgctgaatgattatctcgttgcttacgcaaccaaatatctaatgtatgtccctctgcatcaatggcacgatataaatagctccattttccttttattttgatgtacgtctcatcaatacgccatttgtaataagcttttttatgctttttcttccaaatttgatacaaaattggggcatattcttgaacccaacggtagaccgttgaatgatgaacgtttacaccacgttcccttaatatttcagatatatcacgataactcaatgtatatcttagatagtagccaacggctacagtgataacatccttgttaaattgtttatatctgaaatagttcatacagaagactcctttttgttaaaattatactataaattcaactttgcaacagaaccgatgttggtaacatttatacaggatcattatacttaagtttaatttcgttattacagaaccacacattccaaccagaagagaaagtatgtctatttagttatggttcaggagcagtaggagaaatctttagtggttcaatcgttaaaggatatgacaaagcattagataaagagaaacacttaaatatgctagaatctagagagcaattatcagtcgaagaatacgaaacattctttaacagatttgataatcaagaatttgatttcgaacgtgaattgacacaagatccatattcaaaagtatacttatacagtatagaagaccatatcagaacatataagatagagaaataaactagtggccgattgtgcttgatgagcttgggacataaatcctaactcgaaataaataagcatatcactaaactgattttttaaagtttacagtgatatgcttatttttttatcttacgattttgtacgtgcatgcttgcctaggggtatggctcgagccattagtctctcgcacatactattccctcaggcgtcagcacttacaaaatcggttgtaattttcatttttatacgcattcttactgagattatactaataagaggaatagtaaaagcaattctaagtaaaattgcagataagaggtttgttaaaagcagttctaagtaaaattgcagataagaggtttgttaaaagcagttctcagtaaaattacagataagaggtacgttaaaagcagttctaagtaaaattgcagataagaggtttgttaaaagcagttctaagtaaaattgcagataagaggtacgttaaaagcaattccatgcaaaattgctgataaggggtaagttaaaagcagttctcagtaaaattgcagataagaggtacgttaaaagcagttctaggcaaaattgcagataagaggtgcgttaaaagcagttctcagtaaaattgctgataaggggtaagttaaaagcaatcctaagtaaaattgcagataaggggtacagaaaaactagacttgattacaaaatggagcttgggacataaatgattttttaaaaatgagatgagacgtagattaactccataatcaatacgaatctatcgacttctttatttatgatattcatctctttttaatggaaataaaagtgcgattaatgtgataatacagttacgttaattaaaaaaataaaaatgcaaggagaggtaatatgctaactgtatatggacatagaggattacctagtaaagctccggaaaatacaattgcatcatttaaagctgcttcagaagtagaaggtataaactggttggagttagatgttgcaattacaaaagatgaacaactgattatcattcatgatgattatttagaacggactacaaatatgtccggggaaataactgaattgaattatgatgaaattaaagatgcttctgcaggatcttggtttggtgaaaaattcaaagatgaacatttgccaactttcgatgatgtagtaaaaatagcaaatgaatataatatgaatttaaatgtagaattaaaaggtattactggaccgaatggactagcactttctaaaagtatggttaagcaagtggaagaacaattaacaaacttaaatcagaatcaagaagtgctcatttcaagctttaatgttgtgcttgttaaacttgcagaagaaatcatgccacaatataacagagcagttatattccatacaacttcgtttcgtgaagactggagaacacttttagattactgtaatgctaaaatagtaaacactgaagatgccaaacttactaaagcaaaagtaaaaatggtaaaagaagcgggttatgaattgaacgtatggactgtaaacaaaccagcacgtgcaaaccaacttgctaattggggagttgatggtatctttacagacaatgcagataaaatggtgcatttgtctcaatagaaagttagaggtgagtcttacgtttcagtgacggtagacttacctttaacatgttacatactaaaaaattaatttgaataagaaagagagacatatatgaaatacgatgattttatagtaggagaaacattcaaaacaaaaagccttcatattacagaagaagaaattatccaatttgcaacaacttttgatcctcaatatatgcatatagataaagaaaaagcagaacaaagtagatttaaaggtatcattgcatctggcatgcatacactttcaatatcatttaaattatgggtagaagaaggtaaatacggagaagaagttgtagcaggaacacaaatgaataacgttaaatttattaaacctgtatacccaggtaatacattgtacgttatcgctgaaattacaaataagaaatccataaaaaaagaaaatggactcgttacagtgtcactttcaacatacaatgaaaatgaagaaattgtatttaagggagaagtaacagcacttattaataattcataataaaacagtgaagcaaccatcgttacggattgcttcactgttttgttattcatctatatcgtattttttattaccgttctcatatagctcatcatacactttacctgagattttggcattgtagctagccattcctttatcttgtacatctttaacattaatagccatcatcatgtttggattatctttatcatatgatataaaccacccaatttgtctgccagtttctccttgtttcattttgagttctgcagtaccggatttgccaattaagtttgcataagatctataaatatcttctttatgtgttttatttacgacttgttgcataccatcagttaatagattgatattttctttggaaataatatttttcttccaaactttgtttttcgtgtcttttaataagtgaggtgcgttaatattgccattattttctaatgcgctatagattgaaaggatctgtactgggttaatcagtatttcaccttgtccgtaacctgaatcagctaataatatttcattatctaaatttttgtttgaaatttgagcattataaaatggataatcacttggtatatcttcaccaacacctagttttttcatgcctttttcaaatttcttactgcctaattcgagtgctactctagcaaagaaaatgttatctgatgattctattgcttgttttaagtcgatattaccatttaccacttcatatcttgtaacgttgtaaccaccccaagatttatctttttgccaacctttaccatcgattttataacttgttttatcgtctaatgttttgttatttaacccaatcattgctgttaatattttttgagttgaacctggtgaagttgtaatctggaacttgttgagcagaggttcttttttatcttcggttaatttattatattcttcgttactcatgccatacataaatggatagacgtcatatgaaggtgtgcttacaagtgctaataattcacctgtttgagggtggatagcagtacctgagccataatcatttttcatgttgttataaatactcttttgaactttagcatcaatagttagttgaatatctttgccatcttttttctttttctctattaatgtatgtgcgattgtattgctattatcgtcaacgattgtgacacgatagccatcttcatgttggagctttttatcgtaaagtttttcgagtccctttttaccaataactgcatcatctttatagcctttatattctttttgttttaattcttcagagttaatgggaccaacataacctaatagatgtgaagtcgctttttctagaggatagttacgactttctgtttcattagttgtaagatgaaatttttttgcgaaatcacttaaatattcatccatttttttaacggttttaagtggaacgaaggtatcatcttgtacccaattttgatccatttgttgtttgatatagtcttcagaaatacttagttctttagcgattgctttataatcttttttagatacattctttggaacgatgcctatctcatatgctgttcctgtattggccaattccacattgtttcggtctaaaattttaccacgttctgattttaaattttcaatatgtatgctttggtctttctgcattcctggaataatgacgctatgatcccaatctaacttccacataccatcttctttaacaaaattaaattgaacgttgcgatcaatgttaccgtagtttgttttaattttatattgagcatctactcgttttttatttttagatactttttttattttacgatcctgaatgtttatatctttaacgcctaaactattatatatttttatcggacgttcagtcatttctacttcaccattatcgcttttagaaatataactgctatctttataaacttgtttgaaatttttatcttcaattgcatcaatagtattattaatttctttatcttttgaagcataaaaatatataccaaacccgacaactacaactattaaaataagtggaacaatttttatctttttcatcaatatactccttatataagactacatttgtagtatattacaaatgtagtatttatgtcaaaataatgttataatttttgtgatatggaggtgtagaaggtgttatcatcttttttaatgttaagtataatcagttcattgctcacgatatgtgtaatttttttagtgagaatgctctatataaaatatactcaaaatattatgtcacataagatttggttattagtgctcgtctccacgttaattccattaataccattttacaaaatatcgaattttacattttcaaaagatatgatgaatcgaaatgtatctgacacgacttcttcggttagtcatatgttagatggtcaacaatcatctgttacgaaagacttagcaattaatgttaatcagtttgagacctcaaatataacgtatatgattcttttgatatgggtatttggtagtttgttgtgcttattttatatgattaaggcattccgacaaattgatgttattaaaagttcgtcattggaatcgtcatatcttaatgaacgacttaaagtatgtcaaagtaagatgcagttctacaaaaagcatataacaattagttatagttcaaacattgataatccgatggtatttggtttagtgaaatcccaaattgtactaccaactgtcgtagtcgaaaccatgaatgacaaagaaattgaatatattattctacatgaactatcacatgtgaaaagtcatgacttaatattcaaccagctttatgttgtttttaaaatgatattctggtttaatcctgcactatatataagtaaaacaatgatggacaatgactgtgaaaaagtatgtgatagaaacgttttaaaaattttgaatcgccatgaacatatacgttatggtgaatcgatattaaaatgctctattttaaaatctcagcacataaataatgtggcagcacaatatttactaggttttaattcaaatattaaagaacgtgttaagtatattgcactttatgattcaatgcctaaacctaatcgaaacaagcgtattgttgcgtatattgtatgtagtatatcgagcttcacatgaaacagctaaagaagctttgggcgataaagagttaagagccattgcacatgagttaactaaaacagttaaggataacatgagtgttgattggtctaaacgagacagtgctaaagctaaaatgagagttcaagttagacgcctattaaagaaatatggctatccaccagatcttcaaaaaatggctgtggaacaagttgtagagcaagcagaattaatggcaagtcagcaataaaaaaataaatcataatgagtccgggacataaagttcttggataagtgaaaaaagacaatttctattgaaataatatagaaattgtcttttttataaattttttgattattttcagctcgttgagctactacttttcttatattaagtgccattaatacaaaaccaagttctcttttgactttattgagtcctcggacagacatccgagtgaaacccaaaatagccttcataaatccaaaaacaggttccacatcaatttttctttgactgtagatattttttgtttctggttctgaaagctttttgttaatttgggatttaaaatattcccagttataattcttcattatttttttgtttgtttttgaattgaagttcatacattgatttttcagaggacattctgaacaatcatcacattcatataatttgaagtctcgcttataaccatacttatcatgacgataggcatatcttttaaaacctagccgtttattattcggacaaatgaattcgtcattaatttcgtcatagttccaattttgagtattaaagatgtcacttttatattttttagttttatcttttataaacattccatatgttatgagtggcgttcgattaaagtcatctataattgccttataatttgattcactaccataacctgcatcagctacaatatattcaggtaaatgaccgtaggtctcttgaattgaatttaaaaatggaatcatcgttctagtatccgttggattttgatacacattataagataaaacaaattgggaatttgttgctatttgtaaattataccctggcttaagttgtccatttttcatgtgatcttctttcattctcataaatgtcgcatcataatctgtcttagaataactatttctatcctttaaaatagatttttgaaattcgtatcgatactttcgctcaaaataatcattgatttgctttttgtattttttgattttagttcttttgagacgtatttgttttcttgttttagtacatttttcattgttgatatgttggtttaaatcttcgatttctttatctaagtgactaccaatcaaatctatttcttcttttgttaattcattatcatgatcttctttaatttccggtatgattttattggttaccaattcatggtagagggctttagaatcctcattcatctttgattcatggttttgaatactctttttccatacaaatgtatatcgattggcatttgcttcaatttttgtaccatcaataaaaatagctttatcatctataagattttgttttacacactgactgtaaaattgaataaataaagattctaataaagcatctacttttggatttactctaaattgattaattgttttataagaaggtttttgattttgtgatagccacatcattcggatgctatcattaagcattttttctattttacgacctgagaatacagattgtgtgtaggcatatagaatcacttttaacatcattttaggatggtacgaagttgcaccacggtgatgtctgaattcgtcgaattcattgtcaggaattgtttcaacaatatcatttacagtaaaacgatgttgatttgttttgtttccatattgacctccatgtatttgctatgatttcaaaatccatttttgacgtgccttagggttgagtggatgcataatttcatttgttactggattgatgagcttttttactttctttttatgaggttttaacatttccatcacttgttcgacacggtcgataacaactggtcgcttcgcataggcaccataagcaagaatcactgtgtcactttcactaatcgctttcatcaaatgaatatcagtgtgctcatcgtatggatttttgatatgtttgaggttttcgggtgttctaatattagagaatagatttacaagatatacagcaccgtatcgttctgaattggctaattggttgaggataagaacagttgtgagatcgagtgataatacaccgtctaaatgaggatacatcgttatcactgtgcatgcagctttcttttcatcccatgttttcttgagtaaatagcggtgctgttcatcatcgctaaatatggcttctgtgtgtatcgtacttttgattgtattcatcatcgtcacttcctttagtattcttctggtaaaagcatcacataataaaaagcgtccacgtcatcttcacgaatgacgtagactttcttaggtaatgcattttgatttttttcatagtttgtatagtgatattccaatttgtatgtgggttgttcttgttcatgtgtgattgagagtatattctcatcttcttgtaatttaaaaatgtgtaggtaatctgtatgaggctggttatcttttttttctaccatgtgccaaagtaagatttgaaggtctagtggaatactttcattaattcctcttgtgatgtatcgattgattttcatgctatttccctcccttctgcttttctttcatgatgtcgatgatttcgttgataactgtgacggataattgagcaactatgatccaattattcatggtcctgacctccttgttttagtaaatgacgttcatcaataatgatattttgagtatctgtaaggtacagaaagtccatgtcaaaatggtctaagtatccgacactgatgagttggttattggcatacattagaaatggatagatacttagctcatgtagttcatcattatagtaggtataagtctcgagtgtgagatgtaccagtggagaatcattaataaaacgttccggtagaatattttctgctgcttcctccagcgcttcacattcccaagcttcgttattagatagttggaataggtgggttatatattgtttgagttcttgagtgatggttttcatattattgcctcctagatagtgtaatagtgatgtagttcatatacatcattgagataatatatatttgatttgtcatttattacgaatcccggtgggaataagagaaaattccatataaaaacccgctacaaacgttggtatgccaaggaaatcctgaaattccgcctattttgacaaacaatcaactcattatttataagtattgatgatagggttgtgtctctgcttccttatatatattatttatttataaaaagtaacgggattttgggattgtgcttgcacaatccttctgtttcttcgaatctgcaaatcccaatcatttcccgattgttactttacttgatatatgagaatgattttacctagtaaatgagaaaagcaatgtcctatattaaagtacattgctttttctattaacgaatacctatgactaaactatctctagctgtttctacaacttctgtactgattttatctaagccatttatatccataattctatctatctgcgcaaataaacgatgaatcagcctaaaattcccttttgtaattttaataatcgtcgttattgcctcataatcagtaaaatcttcgagttttagatcaaatcctaaatcttgccacttatattctaatatatgatgcgtctcgtctttacttagattatcaaattcatgtgcaaaacctatacgcgaatatagttgaggataacgagatagttttttctctatacctggcataccaataaatatcattgctaaattatgttcatcataaatagctcttaattgctctaaatgttgcactttaaggcgatcaatctcatctactataattaaatcaatatatttaaacatatcactataatgtttactatgatcatgaccatacttatttacgatgtgtaatttttgacccaaatcaatacttgcactaatactatatagatcattacttaatcttgtttgtttttcagccggtgcagtataaaatatcttattcaccgataatatatcatcagtcgttttactagctagatcttcccaccctctatgattaacttgcttttcaatagtattccaatttgtgtaatacctagaagataaagtttttccgacaccaggttgaccatagcagatcccaatatattgatatttgatacaagcatcgcaaaattcagcaaatcgtttatactctttcgtttcaatgaaattctgatttttagtcattacgatacctctttaattttttgacgtttttggtcgtttcttgaggtgagtaaccataacttttttcttccttaattaaatcagtggtgcttggactagcaatgttttgttttaagtgttttcttctctgactacgtgcgtgttgtatctcttttatatcaattgaataatcagctaaatcaggggatattgctgtacaaagaaattcatctctataaaaaacgcgtatttcagccatatcattgggattgtaacgaattaatacatactcacctacataagcagttaggtttgtattactgtatctaaagccttgaaaatgaataccatctgaatgaatttttctagatttaggtatttctaataataataaatcaagttgttctaaactgcttggcatattaggaaaaaaatgattactgttccaccgattgataggagtgctctggatagcactgtgctctttttgattataatcttcaattaaaaagtatcgtaatttttcttcgaaattttgaaaatctattaaatcgctagaagtatcattattgtttatatatccaggaagttgttctaagaaagtttggttaactgtctgaaaaaaccgttctattttcccgcgaccacgagggacaccaacttttgaaaacatcaagttaattttcaaatcaatagcgacttgttccatgtggtgcgaggtaaagtcactcccgtgatctgtgtagaatttttcgggtataccacatactggccaattggtattattcttattccatattgcttggtgtagtgttaatgctgtgttttgagcattaggagcatcaaaacttataaagtagcctgcaattgcacgactatagtcatccataataatggttagccatggtctattgatattacctttttgatctaatatataaatatctagcaaagtatggtcggcttgccatatttcattgggtcttgaggattctcttatttgtattaaatcgtacttattttgatagtatttttcaccttggtgagagaaatcaataacagacttaggcattgctttaataatactataaacttgtttataacttggtttataaaaattattctctatacaataattagcgattttcctatgaatcgtagcaatactatttcttttattcttgagtgcaaggcgtttaatctcgtctattatgttttgttttaatttatgctcacctttatcaactcttgtattatgaattagaccagtaagaccttgttccttatataatttattccacctataaagtgtacttaacgcaatacctttgcttttagaaatgcttgataaagattgcttgcccaagataaaaggttttataatattgtacttttgagtagcttctttacgtttggcttcagaaaaattagttagatacttctccttgtttttcatcttccttttcctccaatttattgaggtaacgataaatcgttgtacgtgaaacttgccactgctctgcaattgtcttaattggcgtgccattatcataaagtgtcttaagtaagtttaaatctttttgatttaatttttcgggtctacctccatagcgtcctctagcacgtgctgcaattcggccagctgaagaacgttctaaaattaaatttcgttcaaattctgcaaacgctgcgaataaatgaaataataattgtcctgtagaacttgatttatccatcgttatattttcttctaaactatggaaacttacacctcgttcgttaagctcattaactaatgtgattaaatcctccatattacgtcctagtctgtcgagtctccaaacaacaatcgtatctcctgatctcgcaaattcaattgctttatctaatccaggtcttttactttttgaaccactaatatggtcgctaaatatcttttcacaaccatatgcgtttaatcggtcctcctgtaaattcagattttgtaatccagttgaaactcttgcataacctattttcaaaatacaaacctcctatatacatatacagtgtaccataacttaatttcaaggtcttttgtgaacatagattttttgttgggtttttgaacacgaaaatatatgtattactcacttatttcggcataaaaagagagtgtacagaaaatggttattttctgtacactctcatctttaataatatattttaaatgttattaacaaaactaatttaataagagtcaagcatagtttacatatgtattatgtttgaaacatatctctaattactttttactaatatcatttaaaatgtctcgcaattcttcaatttctttgttatttaattcttcatttttcgcaaaattcagcactaaacttttcatgtcccctccatacagtttattaagaaaggttttagcagttttcattttaatatcgtcttctttaatatttgatgagtaaaaataaatattctctgatttgtatcgttttataatctcttttttatatagtcttgtgattaatgttctaatcgttttatcgctaacttctttatatttttgaatttcaactacaatttcattagctgatactgattttttaccccatattatattcataacatcccattcagccatagatatttcaacttgcttattggccatttaaaacacccatttcttttaatattttttcactgattaattcagcatttttcccagatggctttccatctgataaatgtgtagcaaaataatacttatcatgatttgtaattacgtaacctacaaaccacccattattatacttcccgtttactatacctgtacctgttttcccatacagttcatacttttcatttttcttaatcaataatgaagaagataattgattctttgcttttttactaaaatggttattttgttccatcatatttttaaaaactattacttgttcaagattagatattttcaaactatcttccatccaatagcttttataacttcccaagttttcattaccataatttaattgcttgagttgagccgcagtatagttctttggtatttgattactaatacgttcgaagtaccaattaactgaattttgcattgctgtatttaaatcttgttccttattccaagactcgaaaggataatgtttatgattccatgacatacgtgaatttttatcacttatgatatgatggtcaagtccaaacatcgctaaataaattttataagttgaatcaggagaatatctctttctactttctttttcattataaatatagtatttgtctttcttcatgctgtacatgacgaaagatccactatttgaaccaaaatttttactttcatctaaaatttggtgatcgttctgtaagggctttttataattataatcagttatggattgccccatcaaaaactggctttgaattaccatgagcaaaaaagtaaaaatacaaataaaaattggaattaatttggactgttttttcaaattggcttcttttatattaattaatcttcttttgagtaatgactttttaccattaaatgaatggcttaatatatttttattaaaaaatggaatatttaatacggagtccataatagattccgcataagttttaaattcatttttgttaatattattaagaacaaatctatcggcttctacttcattgtcatgaattatctttctttttacaatatgtattaatggattgtaactcataacaatagagaagatattaaagataattaaatgtaaagtatctctatttttagcatgagcatattcatgcaatattatatattttagtcttttgtcaattacacttttaaaatatgaactaggaatcaaaataatatatttcccataccaaaaagttattggagattgaatagtctctgcttttcgaatcacaatattttttttatattgatggttgaaaagtatcgtatctattttatttttttcattttcgtttagataaagtgactgtctctttaaatatttaagatataataaggatttcaaaaatttaaaacttaaaataataaccaaaactatccaaataactgtgcagatattatcaattgaatcccaattaaacttatggatatctgttgtgaactcttgaacaggtttggtggtatttatgttatggttcaagtcgtgtgacctactttcaactgtgggcgattgattattcacattattaaattttataaaagagaatttaattgggataaaaggaattaatccagcaagcacagttagataccaaactttataatttaaactataattaaaatagcgttttaatatatacctaaaaaatactaacaatagaaatataaaacaaaagcttactacgctcattattagtaatttagccattttgacaccttctttcaattatttataataaacaattgacaccaatattacaattgtaatattattaatttgtaaaaattacaactgtaatattggagggtttattttgaaaaagttaatatttttaattgcaattgctttagttttaagtgcatgtaattcaaacagttcacatgccaaagagttaaatgatttagaaaaaaaatataatgctcatattggtgtttatgctttagatactaaaagtggtaaggaagtaaaatttaattcagataagagatttgcctatgcttcgacttcaaaagcgataaatagtgctattttgttagaacaagtaccttataataagttaaataaaaaaatacatattaacaaagatgatatagttgcttattctcctattttagaaaaatatgtaggaaaagatatcactttaaaagaacttattgaggcttcaatggcatatagtgataatacagcaaacaataaaattataaaagaaatcggtggaatcaaaaaagttaaacaacgtctaaaagaactaggagataaagtaacaaatccagttagatatgagatagaattaaattactattcaccaaagagcaaaaaagatacttcaacacctgctgctttcggtaagactttaaataaacttatcgcaaatggaaaattaagcaaagaaaacaaaaaattcttacttgatttaatgttaaataataaaagcggagatactttaattaaagacggtgttccaaaagactataaggttgctgataaaagtggtcaagcaataacatatgcttctagaaatgatgttgcttttgtttatcctaagggccaatctgaacctattgttttagtcatttttacgaataaagacaataaaagtgataagccaaatgataagttgataagtgaaaccgccaagagtgtaatgaaggaattttaatattctaaatgcataataaatactgataacatcttatattttgtattatattttgtattatcgttgacatgtataattttgatatcaaaaactgattttccctctattattttcgagatttattttcttaattctctttaacaaactagaaatattatatatacaaaaaattataaataatagatgaatagtttaattataggtgttcatcaatcgaaaaagcaacgtatcttatttaaagtgcgttgcttttttctcatttataaggttaaataattctcatatatcaagcaaagtgacataaaaataaatatagattttttctttgtaacagaaccgttcatttgaaggtcatctctatcataaatatttaaattaactaaaaattttaatcatctgtttaatacttatgaaatgtatttacggtaggtattaaaattgatgaaatttatataagtgctttcaatgaaaatgaccgtttatttatcctcctgatttaaggagttagaaatttcgaaaacgattctttccatttgttgcatttgttccatgtccagatatttaatacattatagaaaaccaaagaccatcactaattaaacgcagttttaaaatttcatcaggattgccttcgtctttaaaatgggcctcttttaatataagttctactctttcatacctaactctttcaatgccatcgtttcatacgccgattctcctgattccatagcaaactcagcgataaacattgggaatactgcattgagttctattatatgctctttcattcgtggccatatttcacctccagctttaccgtatgctgttataagttgctctaatccttcgtcgtcgaatacacgatggtgtcctataaagtccattgatgggtcggagtgggttgcttcagtccagtctatgagacctgtgacgtttgcttggttatctaccattatatgtcctggatgtaagtccccatgtatcatggtcgcatgtcgaggccatagttcgtcgttttctaaccattgtttccatctgttccataattcatctgatacgccataagtttctttaactttattcattcttctttgaaagtcattttttatttcttgtatggttttgatatttatatgctgaacgttaatgttttcttctggtatgttgtgtaaatctacgagtgtttcagctaatgtgttaataaagttttctggtaatggtttgtgttcaatttcccatacataattttgtatttctggatctattgtggctgcgggtttacctgtaagttttgggtaagcaataaggtcttttgcatgtactttccacttcggtatttcaaatgaaacattcttctgtaagaagtctaccgtttgtttttcgggttttgttcgtttataaacgtcaggtcttcttggtagtctcaaaacccattctactccatgtttatcttttccaaatgcaacttgaaaatcaagtcccgattcattcaatgagattgtttgaggttggatgtgtaattgatatttttctgcacatttaataatttcattatgtcgagtcattttattggatccttatttctattatatttttcttgtgaacgtattttttatattgatataaatgaacctaatattcaatataaattagtgtatagtttttaagttatatcatgaagagattgtcctgttaattcccattttttatctgatacatgtttaacaaaccttgtatcatgtgatgtaaacaaaatgattccaggatatttattcataaacatttctaatgcttctaatgttttaatatctaaaaaattagttggttcatccaaaattaacatattcgctttcgttgaaaataatactgctaacgataatttcgttctttccccaccactcaaaacattacaagaacgatcaagtgcttcatttaaacccaagttatttaaaatagctctactgaatgattctgatgaatccgtttcatccattaaatattgcaataatgaaacgtcacgcatgtcttcataagcaagttgacgatagtatgccatttgcactttaggagaacaatcaattccctctatttggtggtaaatagcttcaagtaaagttgtcttacctacaccatttgcacctacgagcgctatatttttgccatatggtatttggaatcgtacttgtgttagcagtttttgacttcctttaaccaatgttagattttgtgcaatgattggataattattatggatatcataaattttattttgtgggaaattgaattcatgataactttgtggtttttcaacttcttccaaatgttccattcttttttcaatatgcttagcttgtttttgagcagccttctcaaccgtgcctttttgttttgatgcacttaaacgatctggtgctatacttttgtttttttgttttgatgatgcttgtgccatttgttgcgcttgatttcgtttagctttactggcttgggacaatctttgtttttcacttatatactgttcatattgacgttgttgttctaactgttcttgttcatattgattttgatactgtgtgtaattacctttaaacactcttattgtgccatcttcttgtatatcccaaattgtgtcagcaatttggtctataagtgctctatcatgacttactataattaaagtaccatagtaatattttaaaatatttttcagataatctttaccaattttatccaagtgatttgtaggttcatctaaaagtaatatcggactataatttgatatgacattagctaatttatattttgctttttcaccaccactcatactgtcggttgtatgcataggtatatggagttcactcattaaactaccgtctaacgtgttaaaatcattttccacatccatgttaagctgttcaaaatattgaatttcgccaaccgtttcaactgttccagattctggttttgttttttgagcaatcatatttagtaatgtggttttgccagtaccattacccccaataagtgctattttttcaaattggtaagcgtaaagatgaccgatgttaagtgatcgtaaatctgtcaatttatgattgatttggttaaatttaattgtatattgttccatatttatacactccttgtatatttaaaggacgtgtacgcaaaaaaatgagacaggctactcccgtctcattcacattacactttcaaacacttaaaaatttattatgatgttttagtatttgaaagcgtttattattcctatcgaaggataaaaaatgacataagtcatcctatgagtgtgtattgcggacaagcctttttgaattaatttagttttgtattcaaaaaggtttatttgagtctcatagaagctgtcattttaatcctccttcatcgataaaatagtaatgttaatataacattttgttggtttttttacaatatatctctaagtagaaagattatataacaaaagtataaaaatacaattttagattgattatacatctccttaatttagagtgtactcataaaatacggttctgttgcaaagttgaatttataatataattttaacaaaaaggagtcttctgtatgaactatttcagatataaacaatttaacaaggatgttatcactgtagccgttggctactatctaagatatgcattgagctatcgtgatatatctgaaatattaagagaacgtggtgtaaacgttcatcattcaacgatctaccgttgggttcaagaatatgccccaattttatatcaaatttggaagaaaaagcataaaaaagcttattacaaatggcgtattgatgagacgtatatcaaaataaaaggaaaatggagctatttatatcgtgccattgatacagagggacatacattagatatttggttgcgtaagcaacgagataatcattcagcatatgcgtttatcaaacgtctcattaaacaatttggtaagcctcaaaaggtagttacagatcaggcaccttcaacgaaggcagcaatggctaaaataattaaagcttttaaacttaaacctgactgtcattgtacatcgaaatatctgaataacctcattgagcaagatcaccgtcatattaaagtaagaaagacaagatatcaaagtatcaatacggcaaagaatactttaaaaggtattgaatgtatttacgctctatataaaaagaaccgtaggtctcttcagatctacggattttccccatgccacgaaattagcatcatgctagcaagttaaacgaacactgacatgatatattagtgattagctatattttttactttgcaacagaacctagcatatgcatctacacttattagatgggctatataattttatgagttcgcattatacgtcttttttatctctccactcacaagtgttataacttagttaacaatgaaactagcatgaatagcaccttatctcaagcgtcaattcagatgcctgagagaaggtgcttttattttatgtaatatctgagttatatatagctgctgataagtaattttatataacgctagttttacttatagtttttcatcactccacccaagaaaaccatctttaacttttattgtaaactttccactccagaaagtactaatttcataatagaagatgcctccactttctcgaatgaatttgatatcatttccgtattttttgataacataattgtctgcatctgttcttttagacatttaagaccacgccttcattttataaaaatacctcttttatcatctaaccaaaaattaaatgtaagatgtttttcacaattatcaaactaactacaataacaataaaacttgatatcttatttaaaattattatatattttccagtttgatctatagatcctaaaatcttccctaatacagctaataaaataaaccatatccatgaaatcataatagtagaaatactgaataagaatttttctgaacctgaataaacagaagcgcttgttccaattactcctactgtgtccatgattgcatgaggatttaatagtgatacagatatagcaaagccaatttgctttttagcactcatagagtcatgattttctaaattattaggtttttcattccataatgaccacgccatatataataaaaacataaggcctataatatatataactaattgcaacgtaggtaaagacattaaaatcaatgaaacgcctaaaactgcaattgttattaaaaatgtatcgcatagtccagctgttattatgactggtaaagcttttgtaaatttcttttgattagctccttgattaaatacaaaaacattctgtgctcctaacggtagaattagacctagcgctaataaaacaccatgtacgattggttgcaacataatactaactctctttcattttactattgggtgtacaaatatcttttaccacactataaaatcctggtaatgtagttttgaaaaatcctgtgcaatgatgtgcttctctatattttttatcttgcatcaaaatagagtgtgccttttttaaattatagtgcggaatagctgggaataaatgatgtaccaagtgataattatcatgatgtgggtgaaataaaaatattgtccaaggcataccaaacgtatttctacttgctgttaattcagtatcattgtttaatcctgaatgttctgccatttctgcccagtaacgaataatttgaaaagttgtaagaagtggtacaaaccaaaagataataaggtaaaaccaaaaattaaatgctatagatgttgatatcaaaaccaaccataaaatatttctagtccaaagttctgacttaggtatgtccttactataaaggttagctgataccgtacctagtatatactttggcacatgaaacagtaacaacacctttataatgtgatcttttataaatttattgatgttttcctgtggcttatctagtccaacaatacgatatctttttgtatcaggatcattttcttcatcccataaattcttatgatgttgaaagtgagaattacaatatgtagtaaaacttgtaaaaatggggaatgctataaaaatacaagtaatccacttattataaaatttattcgtaaataatgaacgatggcatgcttcgtgcattaaattgtcaaaagctcgcattcgacttccaattaaaataatactaagcaggtaaacaaatatatttcctgttgttatgcttaaataagcacttccaaaaataaccaaccaatcaaaaagtaaagcaaaaatattatgatagttatcttttttcatcaaaggttttaattcttttttgatttctttagaaaaaactgctttttctaatttcagtgacatcataacccctcctttggattgtatgttataataatctgaaatttaaaaaaactaccagattaaagataaaattccaaccagatttaaggagaagaagtatgggaaattttcaatacaaaatgataatagatgatattattaataagattaacaatggcgaattatcatcaggagataaattaccatctcaaagagaaatttctcaatattataatgtgaatagatctacagttatacagtcattagatattttgaaaagttatggtattttggaaactattgaaaaaaaaggcgtttatgtatctcaatataaatggaatgcttatattacaagtaatattcattggcaaaattatatagggaacagcatgtctaaaagcaaccaattttatattcaaagaatcaatgaattagaattcaatcctaatattatacgtctaggtactggcgagttatctccaaagttaattccaaatcatttgttcaaagaaataatatcaaacagtattagtgactctatacaaacgaattatgaggaaccaaaaggaaaattaagtcttagattagaagtagtaaattatatgaaaaaaaggggagtcatatgtgatgtggataacatatgtatcacttcaggtgctgttcaaggattaaaactaatagctgatggattattagttcctcaatctaaaattattattgaaacaccttcttatattaattccatacgtacttggcataatatcaaatcgaaaatgatccctttatcaatcaactatataaagcgaaatattaataatatatttaaaataagtagtaactacaaaaacagcatattttattgtatacctactttacacaatcctactcaaaatacttatactaaagaagaaaagcaaaaaattatagatcaatgtcaaaaaaacggaatacctattgttgaagatagtatatattctgatttatggtttgatgaaaaaagaccgatgcccatgaaatctttgaaaaatagtgacaatgttttatatttaggaagtttatctaaaacggtaagtcctggtctgcgtattggatggatagtagcagataaaaatgtaattaatcacttatctgatttaaaaatgcagaatgactatggtgctagttctatatcacaatatattgccacaaaatggctaaatacttatcatgaaaaacatatatctgaattaaaattagaattaaaaaaacgtaaagatatatttatagacgccctaaaaactcatttatctatgtatggtagttggaatgaccctagtggatcattttatatttggtttgagttctctatatcaataaacgtaaaaaaattgtttaatgaatctataaaagaaaatatacttatacaacctggagaaatatatgattctaactacaaaaactacattcgattttcttactcatacattgatgagaatgatattaatagaagtttaaaaaaattaagtaatattattaaaaaaattagaaattgattcctaagaactttctttactttgcattcctctactaaccagtgttataatttgattaacaaatagtgtactaacatgataaacaccgagcccgataactactgcgaatagttatcgggctcttttggtatattaggttctgttgcaaagttgaatttataatataattttaacaaaaaggagtcttctgtatgaactatttcagatataaacaatttaacaaggatgttatcactgtagccgttggctactatctaagatatgcattgagctatcgtgatatatctgaaatattaagagaacgtggtgtaaacgttcatcattcaacgatctaccgttgggttcaagaatatgccccaattttatatcaaatttggaagaaaaagcataaaaaagcttattacaaatggcgtattgatgagacgtatatcaaaataaaaggaaaatggagctatttatatcgtgccattgatacagagggacatacattagatatttggttgcgtaagcaacgagataatcattcagcatatgcgtttatcaaacgtctcattaaacaatttggtaagcctcaaaaggtagttacagatcaggcaccttcaacgaaggcagcaatggctaaaataattaaagcttttaaacttaaacctgactgtcattgtacatcgaaatatctgaataacctcattgagcaagatcaccgtcatattaaagtaagaaagacaagatatcaaagtatcaatacggcaaagaatactttaaaaggtattgaatgtatttacgctctatataaaaagaaccgtaggtctcttcagatctacggattttccccatgccacgaaattagcatcatgctagcaagttaaacgaacactgacatgatatattagtgattagctatattttttactttgcaacagaaccaacaaaaaccgtgccagaattatttcttatcttcccctcatttatgtcataataataaaaaacgactgtggtggtgagatgatgaaagtattaatcgtagaggatgacttagttatcgggaagatgcttgctgaagagctcaagaagtggcagctagaaccgatcttaatagaaggtttcaatcatgtaatggatgccttcaacacgaatgcaccggaacttgtgttactcgatattaatttacctgccttcaatggttatcactggtgtcaggagattcgtaaagtttctactgtaccgattatatttattagttcgcgtaacgacagtatggatcaagtaatggcgatgcagatgggtgcggatgatttcattgagaagccatttaatatgactgttacaattactaagattcaagcactattacgccgcacgtatgatttcaccactcaagttaataatttaacagtagatgattgcgagttactacttgatgcagcaaagcttaaatttaatgaagaaaccatagacctgacacacactgaattgcaaatcatgcatagcttattccagaacaagggcaaattcgtcagtcgtaatgcgttaatcgaaaaatgctgggaatcagaacacttcattgatgacaatacgcttgctgtcaacattacacgtttacgcaaaaagctacaaaaactaggacttacagattttatcgaaacgaagaaaaatgtcggatatcgtgtaggtgacgtatgaatttcttgaaatcaatccaacgtgaaatttatattgtcatccttacttgtgctttattctactttatattattcatgtataatgtgccgatgcaagcatatatgattggtctaggtattgtattgtttgtttcaatgatttactggggtatccattacatgaactttaaaaaagaataaacactacaggaacagaacgaagatttaagaatcgaaaaccataaacttcgtaatgactttattaactaccaaagtgagttagagtcatattttttaatgtgggtgcatcaaatcaagacaccgattacagcatcaaagttactgcttgaagatcctgatgaacacgtgatttctaacgtgcgtaatgaagtcttacaaattgataattacacgaatcttgcactgaactatttgaaactcatgaaccaaaagacatacatggtctttatggaagtgagtgtagatgaattaattcgaccactgattaaacgttatgcgatacagtttattcatcatcaaacaaagttgcattatgagaaaagtgaagcggttatattaacagatgccaaatgggcatcaattatgattgagcaaatattaaacaatgcattaaaatatgcacgtggcaaagatgtgtggattacgtttgacgaaaatacaaagaaattatcaatccgagataacggtatcggcattaatgcgagtgatttaccgaaaatctttgataaaggtttctcgggctataacggtagaataagtgagaaatcaagcggtattggtttatatattgtcagcacaatctcaaagcgcttaggccataaagtaagtgctacatctacattaaacgatggttcaatattcaccattcaatttaaataactccaatctttcatttttgtaagattagcggctgtttttgtaagaatagataaaggcagccttttctaatcgcgcgtaagataaaggtaacaacaaactaagaaaggtgccagaggtgaaaaatttgaataatataattgaaataaataacttaacaaagcaatatggaagtcagatagcagttaataatttgagtataactgttgaaagtggacaaatttatggttttttaggaagaaatggtgcaggcaaaacaactactataagaatgcttttaggcttaattaaacctacgaaaggtaatattaaaatatttgaaaaagagttcgaaagtaataaaactgaaattttaaaaaatattggtgctatggttgaaacgccaggtttttatagtaatttgacagctaaagagaacttaactataaatgctaaaatattaggtatacaaaaagaaaatgcaattgaagaagtgttagaaatagtaggactagcttctgaaaaagtaaaattgtttaaaaattattctttaggtatgaagcaacgtttagggattgcgagagctttattgcacaatcccgaattattgatacttgatgagccgacgaatggattagatcctattggcataaaagaaattagaaagttgattaaggatctggctcaatctagaaatataaccattttaatttcaagtcatatattgtcagaaatagagcagttagtagacaaggtgggtattattcataacggagttttgttagaagaaattatgtatgaagatttaaaaaaaaagaacagacaatttataagtatatcagtatcagatgaagaaaaagttgcatgtttgttggaaactaacttcggaatttatgactataaaattaaagaaaatggcgaatttaaaatttattcacatattgatagacaacaagaaattaatagattattagtattaaacaatattgatgttttccagatgagagtgatagaagataatctagaaacttatttcgaagacttagtaggaggtggcacaattggataatctactccgtacagaatttattaagttaaaaagatcatatatgtttctaataagtattttaggtacatgcgtagcaccttttatggtggttgtagcttcttttattagtatgcggacgaaagtaccgactcctaatattgtatttaaacagttatttgaagaagtcagtttatatcatatgctaattattggacctcctctatatggggttataatagcctatttgtttggaagagaatatatagaagatactttaaaaaacttattaattatacctatatctagagaaagttttttagtaagtaaaataatattattattcttgtggattcaaacactatctgttattgcatggttgctaactttaatgctaggtatgctattgcattttcaagggttaagccagagtttaataattgattcattctttacatttgttattggcggagtgttattatggatattatctccaccaataattattttgtcgatatattttaaaaattatgttcccacaattgttttaaccataataattactttgataaatttaatgactgctaattctgaacatagaggattatttccttgggctgcagttggagacatatctagaggaacattacctaatacttatccatttctattatctttaattatcataattgttacatctatattcagtgtaattatattattctcatactttaaaaaaactgatataagttaaaaggaggagaaaaatgggttttatagagcagattaaagcatttattttaggtgtagttgaagggttgacagaatttgctccagtatcatcaacaggtcatatgattattgttgatgatatgtggttaaacactgctgacgatttaggaagtgcgtctgcaactacttttaaggtggtaatacagttaggaggttctgttgcaaagttgaatttataatataattttaacaaaaaggagtcttctgtatgaactatttcagatataaacaatttaacaaggatgttatcactgtagccgttggctactatctaagatatgcattgagctatcgtgatatatctgaaatattaagagaacgtggtgtaaacgttcatcattcaacgatctaccgttgggttcaagaatatgccccaattttatatcaaatttggaagaaaaagcataaaaaagcttattacaaatggcgtattgatgagacgtatatcaaaataaaaggaaaatggagctatttatatcgtgccattgatacagagggacatacattagatatttggttgcgtaagcaacgagataatcattcagcatatgcgtttatcaaacgtctcattaaacaatttggtaagcctcaaaaggtagttacagatcaggcaccttcaacgaaggcagcaatggctaaaataattaaagcttttaaacttaaacctgactgtcattgtacatcgaaatatctgaataacctcattgagcaagatcaccgtcatattaaagtaagaaagacaagatatcaaagtatcaatacggcaaagaatactttaaaaggtattgaatgtatttacgctctatataaaaagaaccgtaggtctcttcagatctacggattttccccatgccacgaaattagcatcatgctagcaagttaaacgaacactgacatgatatattagtgattagctatattttttactttgcaacagaaccatcatttttattaaaatactcttttgtaaaatctttctgctcttcaatgtatttaatttctttacctctaaatctattatagctatttgatgattacaataaaattgatcttaccttattgcccttggaagagttagataattacctaaagggcgataaattaataaaggttctaattgataaagattgtagaattaaaagggacatagttccgactgatatagattatcatgtaagaaagccaagcgcaagggagtatgatgattgctgcaatgaattttggaatgtaacaccttatgttattaaaggattgtgccgtaaggaaattttatttgctattgatcattttaatcagattgttcgccatgagctgctgagaatgatatcatggaaggtcggcatcgaaacaggctttaaattaagtgtaggcaagaactataagtttattgaaaggtatatatccgaggatttgtgggagaaacttttgtccacctaccggatggattcctatgaaaacatatgggaagcattatttctatgccatcaattgttcagggcggtatccggtgaggtggcggaaaggcttcattatgcctatccggagtatgataggaatataacaaaatataccagggacatgtataaaaaatacactggtaaaaccggctgcctggatagcacatatgccgctgatatagaagagaggcgggaacagtgattacagaaatgaaagcagggcacctgaaagatatcgataaacccagcgaaccatttgaggtgataggtaagattataccgaggtatgaaaacgagaattggacctttacagaattactctatgaagcgccatatttaaaaagctaccaagacgaagaggatgaagaggatgaggaggcagattgccttgaatatattgacaatactgataagataatatatctttactaccaagacgataaatgcgtcggaaaagttaaactgcgaaaaaattggaaccggtacgcttatatagaagatatcgccgtatgtaaggatttcagggggcaaggcataggcagcgcgcttatcaatatatctatagaatgggcaaagcataaaaacttgcatggactaatgcttgaaacccaggacaataaccttatagcttgtaaattctatcataattgtggtttcaaaatcggctccgtcgatactatgttatacgccaactttgaaaaagctgttttctggtatttaaggttttagaatgcaaggaacagtgaattggagttcgtcttgttataattagcttcttggggtatctttaaatactgtagaaaagaggaaggaaataataaatggctaaaatgagaatatcaccggaattgaaaaaactgatcgaaaaataccgctgcgtaaaagatacggaaggaatgtctcctgctaaggtatataagctggtgggagaaaatgaaaacctatatttaaaaatgacggacagccggtataaagggaccacctatgatgtggaacgggaaaaggacatgatgctatggctggaaggaaagctgcctgttccaaaggtcctgcactttgaacggcatgatggctggagcaatctgctcatgagtgaggccgatggcgtcctttgctcggaagagtatgaagatgaacaaagccctgaaaagattatcgagctgtatgcggagtgcatcaggctctttcactccatcgacatatcggattgtccctatacgaatagcttagacagccgcttagccgaattggattacttactgaataacgatctggccgatgtggattgcgaaaactgggaagaagacactccatttaaagatccgcgcgagctgtatgattttttaaagacggaaaagcccgaagaggaacttgtcttttcccacggcgacctgggagacagcaacatctttgtgaaagatggcaaagtaagtggctttattgatcttgggagaagcggcagggcggacaagtggtatgacattgccttctgcgtccggtcgatcagggaggatatcggggaagaacagtatgtcgagctattttttgacttactggggatcaagcctgattgggagaaaataaaatattatattttactggatgaattgttttagtacctagatttagatgtctaaaaagctttaactacaagctttttagacatctaatcttttctgaagtacatccgcaactgtccatactctgatgttttatatcttttctaaaagttcgctagatagagttctatattagagatgtaaagagttttggtgaagaggtttgtgagtatggcttttataaccagggtgcaatgagaagcactaacagcagctagcttaagaacgcataggatatactttttatggaagtcacagaggaggaataaaatttgaacaggattaacagagtaacctctattcttattcagctgcaatcaaaaaaaataattcctgccaaagaaattgcacagcgatttaatataagcttaaggacagtttacagagatatccggacacttgaagaagccggaataccaattggatctgaggccggaaaaggatattttcttgtagagggcttcctacttccgccggtaatgtttacagcggcggaagtgggtgcattgattacagcagggaaatttttaaattgccatggagatgaatcatttataaaggattttgattcagctatgtataaaatcaaatctattttgaagcatggtgaaaaaaactatgcacaggagttggagaacagtattaacgtgtacagcacatctggacagaaaaatacattggcggataacgttattgcagcaattcagactgcaatctgcaataaaagggtaatatcaattcaatatcctgcatcaggagggcaagaaccggaaagcagaatgatagagcctatatcactggggttttatgaacagaactggtacttaatcggttttgcaggctaagaaatgaatataggaattttcgtgtggatcggattaaaagcatttgcatagaagaagagctctgtcaaagccatgatggctctttggaacaaatattaaaacaaatgctttcatataaaaaactatataatgtaattcttagagctgaaaaaggggagacatacaattctatcaagaacaggtattctctcggcttccttgaagaaaccgatttgggaagtaaaatggaaatcgaattccagacagattcctttgagatattgagcaagcagctgattgaatatggatcaggcattgaaatagtccaacctgatgaattaaaatgcataacccgtaaacacctggcacaaattacgaatcactgcctaaacttgatttagagaaagcgattggtctgttatgtattttttgtaaggtttcatatcccctgctgacatacagctgtcagtgtattatgatattctactatcaaaaaggaggattgaaaaatatgaaaccaaagataattatgcacacacaaattagccttgatggccgcattaaaggctttgataatccggaagtttactaccaggttgccgggggaattcattcggatgcggtgctgtttgggtccaatactgtttttactgcatttgaaaaatatcctgctgaaacagaggctgattttgagaaaatcataacaagcccggaggaccccagaccaataggagtcatacctgacagcagaggtatcttgagaagtcttcattgcttaagaaatcttggatatctgaaggaaattgtcattctggtatcaactgccactccgaaggaatatttgaattatttggaggaaaggcattacccatatattgtgtcaggaaatgatcatgtggactatgaaaaagcctttcagatcctgcatgagcaatatgggtgtaaatacatgcggacagacagtggcggtggattaaccaacaaattattagaaaacggacttattgatgaaatcagtcttgtgatatcaccatgttttgtaggtaataaagaaaaacaactatttgataaccttctgttatctgaaaaagttaatttggaattgcagggaacagagaatgcagaacatggctgtctgtcattgcgctatgctgtgaaaaataaggattagtgcagcatactttaaaaagtgtctgttgggacagtgtcctaaaggaagcataagctcatggctagcggcggtgttaaagtaacggcactcggccccaatatatagttgatatgcccctaagcctttgagggcaaggcggtcaaccgcgccttttccggtccgcatacagtcgttcaatgagggtatcaagctcggcaatgcggcggtgcttctcggtggttcgtttcttcgccgccgttttcggctaattctaattgatccgaactgtaaggataagcaattatccggggctagttaagtatcttagagaggaagataaagataagtaaaccaattttaaagttgtaccgaataaagccttcaagaggacaacatgcttttgaaggctttattgcttacaattacttggattgtaacgcaaaagcaggcaccaaatcaatgaaaaatagcctatccaggcgactgtttcagaaatatgggcttccgccaaggggataccagtggggtgcgacatcttttttgcccactcaaggcatgtggagtgtgtggcgttgttgcgtagaaagtaaggctggagtccttatatctggctgagcttaatctctggtaattttgagggggctgacccattagtcccttttgaaccaaaaaatcgaaggcacccgtgaaagatgtcttcgatttttgttttttttggatgaaatatagaggattttccccctatatttggttttgtatgattgtttttccctcatatttccttactctagttactaatttcctaaaattgtgcgcaagaaatacaagtcccatttccttaaaaattttttcagctcctcggacatggaatcttttaaatttcatattttgtttaatgtttccaaaaactgtttcgacatctatctttcgctgcgcatagtatgaggctgtttctttgctttctatcttttcattcgcttttatttttatatattcccaggttggattaatattcaaacgtcgattttttccttcttttgctttggtacatttctctctcaatggacatcctgtacaatcttcacattcatagattttgaagtttcgaataaatccatttctatctttacgttgtgaataatgtgagaacactactcttttctgattgggacaaatatagtaatcatccaactcgttgtaagtccaattatctcgatgaaactgattttgtttatgggcgcgtttcttctcttttaagtaaccttgatgcggaatgatgggggtggattctgtttcgtctaacacataacaataattttcttcacttgcataaccggcatctgcgacaatattttctggtaaacctatttttgattcaatcttttcaagaaatgggataaatgttcgtgtatctgttggatttggataacaatcataagcaagagcaaattgattttctgtcgcaagttgaatattataacctggttttagttggccattaagcatgtgatcttctttcattcgcataaaagtagcgtcatgatccgtctttgagaaactattgcgtacacccataatcactaattgttcttcgtagctcatttttctttaggcaaaatcatcgaatcgcttcttctgcttatgaacttcagatttttctttacgaagtaattttcgttcttctactgtttcggtttggtcaatcgcttcaattaattgattttccttttcttccaaagattgacgaatcctttcaatctcttctatagaaagttcatcctttaaatcatctattaactcaggtaagatttttgtttccaccatttgttggtagttttcaagggctttttgatcaaggctatccttatactttaaaatactttttttccaaacgaaagagtatttattcgcatccgcttcaatttttgtaccatcaatgtatagagcactgccactgattaagccactttgaaccagtagctcacgaaattgaacaaatgaatgatctagaatatcgttcataatcggatgaacgcgaaaacgattaatagtacgaaagttagggaattgctcttgagataagtagcgcatccgaatactatctatcagcatattttgtatttggcggcccgaataaaccccttgaatataggcacaaagaataatggaaagtagcatacgaggatgatattggggtctacccatagattgataataaggaagaaagacttcatcgggaatagagtcaacaaactgcacaatggcatgagcaaaatcattttcttctaatttaatttcaagatctataggcaaacaaagttggtttatggtataattttgatacatgataaagcacctctctcaaatggattaatcacctatattatagcagagtgtgctttatttttgtattcactttcaaaagataaatagaggtctttccactactatctaaatggaaagacctctatttttcatataggagctacttttgggtcagccctttattcttccttgcacttacgcctattatagatttaatactccttataacaacggttgtagaccttatgaatggtgcaacagctgaaatgccacatgctatagcagcagtttatatttcaatttctcttgtctttggcaaaagcatgataaattgggcagatgatagatttagatattatgtgatgaagcaaggttccaaaccttataaacttgacggtttagcttactctaaaaactatgctaaaagttggttgaaacatttactgtcttacattataggtactgggattttacatttaattgtttatttaattaatgataaaagtcgtacagaagctatggatggtgttattcatatttggacaattgttattattatagacttaattatttgtatttcatattttgtgtggcctccaaaaagaaattaaattatggatataaatggtttagataaaataagtacagaagttgtagaaacagctagagatagtttagttataggtattcgataatagaaaaagcaacgcattttaatatagtgcgttgcttttctcatttattaggtaaaatcattctcatatatcgaataaagtgacacccgataaaaaatcattgtgggatgttctttagcaatttcaatataagcattgtatagttatgaaaaaattacgacaataactgtttcattagataagtgttattgaaattgataaagagcaattcttgaaaatagttagataaaataagcgaaagaatatagtgaaaattattgttataacaatgattctattagctaaatagtaagatatagtgtttggggcaaaaataaagacgaagtgctgagatgcacttcgtcgagttgtttattattgaaaagttgtttaatgatttcgttattaagtttgagtgtgacatagaattgttttttatgattaccatcttttttaatatcaatgcgatcaatcactgatagatacaatgctttgagtcgagatttttctatgtgcttaatatcatgaaagatgtgttgtaatagtttactgatttctttggcatcaaataaagtcttatcttcattttgttgatttttgagttggttgatttgattcgtaatgtcattgagttgcttttcatatttttgaatacttggtctgattactgatgttaagtccggattatcctcgatggttttaatcaagttatttattttgatttgtacttcatcatattgttgttgcttataagcaatatcgtgatgaagtgcagcgccatcaacttgattttcttgattgacgtgtgttactacgcgttgaatgactttatcacttttgactatttcaagtatttgcttcatcacataatcttcaatcacatcagctcttacactgtttgccgaacatactttggaacccttgttccgaaaattactacatgaatagtaacgaatacgtttcttagtcccgtctttaagagtattcgtggtattgcttgctgccataggtgcgccacattggggacagtgaataatgcctgtaagcagattcgttcctttgccatggacttggggtttttgactgacttgtttcttacgcatttgtactttatcccataaatcttgattaataatgggggaatgcttaccttcagctatcactggtttatcattcagccctttacgacgtttttcactccaatctttgtatttcgcaaattgaattttgccgatatagaaagggttagctaagatgtatgtgattgaactaatactgaaaggtttcccctttttagtgacatatcctttgtgattcaatgcattggcaattttacgatagccatgtcctttggcatagcactcgaatatatattttacaatattagcttcatgttggttaatcattagctcgtgtttactatctggtattttgtcataacctagtggtaaattgccttgataatagccttcttgggcacgtctcgtttgacccataaatacgttctcgacaatgttattacgttcgaattctgagaaactcgcaagtatctgtaacatgagtttaccagaagaagtattgacttccatacgctctgacaaactgaaaaattcgacattttgtttgtgtaaatcttcgacaattttgagaagatcagatgtattacgagctaatcggtttgttttgtataccataacacagtcgatattgccttcttttgcatctttcaacatacgttggagctcaggtctgttcatagatttacctgaaataccacggtcagcgtatatatctttaacttcaaaatgatggaagtcacagtattctttgatttgattgatttgtccgtcgatactataaccttctgtgctttgcatttctgttgatacacgtacatagataccgacacgttttgttttaagttgttgcattatgttacatcctttcttcatttatgcaatcgatgattgcatggtttgattgacaatattgagtggttcatttttgaaatagattcctataagatttttatctttcgtaatgtgaatggtttcaatataggggtacaatatgtttaacgtgaaacgtttttgaataatattttgaatgatgtgttgtatttgatgcccattgatagatgtagtgcgttgcggttgttgacgtaatgattgtgtttgctctctgaacgtttctgcatcaatgatgccttgtgccaacttttctatcagttgttcttgagtcaatgtgtgatgtttttctatgtttctttgtcttttgatgcgtttgtcaatcgcacttttaatttttgtgtagatgcgttgattttgataaaagtctcggcacacttctaatactttatcttcaagtgtttgtgcattgatgcctttaaaatcacagacaaagcgtgaagcattcatgtttttaggacagacgtagtaacgtaatgtatgattcttttttctaatggtcatatttgtaagtgttgcattacaacatgggcatttgattttttgtttgagttgattatccgaaggtgtctgtttggtttgtttttgcaatcgaagtctctgcgcttgctcatatatacttgtggaaacaatagaaggaaacatattgtcgaattggccatattgattgttgacacgaccacaataattaggattgatgataatgttacgaacttgatagggttgtcgattgatatacgtgttatcttcttctaataactgtgcaattttcttataaccatgacctttaatgtaataattgaatacagcctttaccgttggtgactcattttgattgatgatgaatgttccgttgtgatattcgtaaccaaaaggtgcatgtgttgtaatcaatcgaccttgctttgctttttcttgaagcccatttctgacttgttctccaatgttatccgattcaagttcggctaaactgatgaagatattaagcttgagtcggtcgaaagcttgatccatatcaaagtaaccatcatgtacgcttaagatatgaacatggtacgtttgacataatttgatgagttttaatgcatttttcagattacgatgcaacctattaagacgataacagcataatatgtcacactgtccttgttgaattaattgtgttatttgtcgatacccactacgattatctttgcgacctgattgtttgtcgctataaaagttgatatgttgaatatgatgtttttcggctattgcttcgatagcttgtttctgtgctgcaagagattgttgtttcatcgtactttgacgtaaatagcctatgacttgtttcatatcggctcctcctttcacagtgataatatatatttatggatgaattgatatataagcccaacatcaatgagatgttgggcgtccatattagtcatttgtttgattgatttcttcaattaccaaatcggctaatatctcgataagttcatccatgtttttcactccgttatttgttctatcttcaatacgtcgattattcagtttgatgcttcacagttgtatgataaagacaattagaaatcttcgtgaactcctgaagggcctatcccttcattagcggatttaaaaagttctttcgcagctttgttatcatttgacggtgtccaattttgaagtaacgacttatctttagttaatccgaggatagatgcaaactctacatctaattttagatggtaaaatacaagtgattgttttttaccgctattatctttgacacttcttttagttgtttggcgtccacggtcagctaatatgaaacctttatctcttaaggcgttgacaacattattaacatcttgaaattgatgattgtttagcatctgtttaaaaacgttcgcaattatttttacttcgatatggtcatcttttaatgagattaatccatagttctcaaacatatttttcaaagcaccttcatctgaaaacttacctctgttttgtgccacaaattgaatgatgacatcaatagctttatcagctaatgagcgttcagagactgtatgagtatgataatcaataaagtagtctcttatattagcgatatcaatatctgtagataaaacacgacctaatattttcgcagatgttgtaatgactgcataacgcttaaacatacgaatacctgtattgtttgtttcgtctttcaatttagcttcaaaccaatctacttccttgtaaaaccattgaataacttcatcttcacgatttataagatatttagctactaacggtaaaacatgaccatagtttagtgctacagcttttttaatattgtcagcattggtcgcatttgtagtgaattgttcattaatctcgatggttcttacacgtaatccatcgttttgagctgaatcattaaaaatactgtattctgacgttgaaatgacagaagtaccccaattcttaggcgttttaacttctccatgaacgtttgaacgttgacgaccttgaccttcagtgatggagtacaataaccccgttgtatctctaaaagttgctgatgagagttcatcaaatacaataggtataccaaaattgttactcaagtaaccttcaagtgcattacgtgtggcattccaacttctaaagagagtttcattacctttggtgggattaccagcgactgatacagctaaagaagctgcagttgacttaccggttgaggattgacctgtaaaactaaaaatgattccggcaaattcggtttcatgtttgtgcttcaggaaactcgtcactaaggcagaaataccaaatacgactgctaattctaaaagaagagaacctttaacctcttttagatacatgttataccaattatcaaatgtacctttaggagttaagtcataagcattatcacaaatggcgtcagatggagatttattatcaaattctttagtagtatagatttcacttaacgatacaataggaccaaacggtgtttccagtatacctaccccttcatataagtaggaaatgggtaattgattgcgcatttgttgcatcgcataacctaaatcttttgtatatttttcattaatactaaatccatacttcattaaagatggcaatttttgtgtcgttaaaatatcactagattcaacaatttctttttgatcttcgtctgtgataattagtttttcagtattagttttagggtcaataaacttattttcgataacgataggacctgcgatttcaacttcagtaggcattcctcctttttcttttgggggcgtgtctttataccaacctttttttgatttgtatcgtggtgaaggattaaatgaaaggttagtttgagccattagcaatcacctcctttcgaagagttgctgttatggtgtggattaggacctgttttaagataaactaagtgaccgtgagtatccttaccgataataataaatggaacacgtggcgcatgttttacaaaatatgcgaaccaacgtccaacattttgttgtacagcttttgaacattgtacatttgcacgactgttcaagtcatgaaatgtaaattcttctccttcaggtaaattgaatgaaatacctaatattttcttttttaactgctcgaatttatctgattgattgaaatacatttaacttcctcctactaatgaactaagataggaaaattaaatatgcgcacaattaactttcttaagttcattttagccaagaagttatcatttgaaagcttgtaaaaatatgttagaaattccgtactaaattaagatggatttttgttgacaaaataaaaaacgctgatttaacagcgctttaaataaaaattaatctgaagttatataaaagtagtcagaaggagtggtgttattatcattataataatctagtgctttattgatttcttttattaatttatcatgatgttcttttgttattttctttggatatttgagttctttttcttctaagtcttttggagacactaggtcactatttaaaattaatgataacagcatatttttaggtgccgaagctctggtgtctcgatgagtaatatattttgctaaattactgtttatacttactttttcattttctaaaaagtttgtactatttttcacatgagcatcagcaattttggtacttatttcagtgtttaaatcgtctatttcatctaaataatattcaagaatctgaagtttatctttagaagtgatacctttttcagtgaaaatcttaataatgatagatttgattccaatttctatattactgtctactagaaaatagagataataattagtcagagcatgttcataatctctttgatcagtaatttcatgattgatgaaataatataagttctctttgatacgattagaagaatctatatctttgtcattgataccgtttttaaaaaagtgtagataaactgagttgtttgagagtatatcatataatacaaataaactttttggtttaaatacatatgattttcctgatttaaagtttgctatgtttattcctagagcgttgcagaatttattaaaattagttgtaaaattatttttttcttgaataaacatgtcgttgtcatttaattctgaactatgatttttaatcatattgatattttcttcaatcttgtcactatttaaattttccatgcaaagtatactatatcttactatatcacttatatttatggaaaaatctttaggagaacgatttaaagtatcctttttattatcttgatctacagccctacatgaatcatcaaaaacttctttgacatttattttatcaatgttcaaaattatgtctactaatgcattttgaaatttttcattatatatgtctctcttattcataatatcactacctttatcaattataataatttattatatcttaatatttgtagaagtacttgatgagaggttagataaaacaccacatttctctggttagtaaaaacataacttctaagactttttttcatatactaataaattatattataaatatttttgaacataaaaggagtgtataaaaatgtatgcaaagaaggtgttttagaatagattttaaggcattcatttttaatataaaatatttataatatttaaaattgaaaatgattatcctttcaaaatttttgcaacgagtaattttactttagttatattataaagtagaattaatagtaattaaaggaacgtttgttcctgtttttatatgtaaatacgagaacgattgaatagataaagaaggataaaattgacttcgaaatagaatatttaatttcaagaaggagagtattggatgttaaagcataaaataataaatttaatacaagaaaagagagaagggagttactgggattttaaagcagaatatcataaagataaagcagaattattacatgatataatttgtttatcaaataacttgttgaatcaagaagcttatttaattttaggagtcgcagataacggtcatattctgggggttgcaggtgattcaaatcgaaaaaaccaagaagaattaatatcatttattactggaaaaaaatttgctgcgggtaggcaccccaagatttcattaatgacatttgaatatgaagaaaaggaaatcgatgtcattataataaatcctaaaggatatgtaccatactatctggagaaagcagaaaccgatcaaaaaagtaaaaaaaacaaaacagtcaatgcaggtagcatttatacaagagttgaagataaaaataccccaatagattctactgcaagtccattagatacagaaatattatggaaaatgcattttggtttatatcctactcctataaagaggttacagaattatttactaactcctgagaaatggatgcagaactcaacaggttattttcatagtgaatcgccagagtatatagtatacaaaaatgaggacattgaagaaaaagaaaattattttaatttagtaagtccattttatgcgtataatcaaatcaatagtaacactttatactcatattacgaatttaaatatcatagtacagttttatatggttgccggtgtatctctttagattcaggtatctacacaacaccagtacctgaactaggtgagataaattttaatatgcatagagatgatactatttattatcgttatttcattgaagagacgatgctttataatattcatctttttatgtataagggtgattcgatggaagagaaatttgcaatggataaatttttagaatgtgttttggtttataaaagtgatgtagaaaaggaactttttgaaaattatatattagataattgggataaagttaatcagtcaattaatgaaaataataaacgtgtatttggaactgaacatttgtcacaacttgaaaaagaagatatcactaaaaaagtaaaaacagttaaagttttaaaagatgaacttgagaactttagaacttgagaaaaattattggttaataggagaaaatcatgaaaaaatcaacactcattgataaatttttagacttactttcttcaagaagctcactcagagaaattcagaataattttattgatgcaaacattatgagagatagttctataaatcaaaaatataacggacaacgtaaatcgttagcgtgggaatatattagtactttaaatttagaagatgaagctgaattttctaaattacttaatgttatagaaacgtatttgtttcaatggaatctgtatatccatgaagttgatgaagacgaagaaattaatagattaataaaaataattaatgtattaggttatgaatataataaagatacaggaaaaataactaaaaatgaaagagaagttaatttaagtactattaaatctttggcaataaaatttgatattgaatatgtattaaaagaatgtaatagaattgaaaaagaggcactaacggatccagaggacgcaattacatctgcaaaatcgatggttgagagtactttgaagcatattttagattctgaaggagaaaaatttaataataatgaaaccttgagaggtttatataaaaaagtaagtaatattatgaatctttctcctggtggacataatgaaaatacttttaaaacaattttgagtggaatgataaatgtaattaacggtctggacgaagtaaggaatgaatatggtgacgcacatggtaaatcaaagaaaaattataggcctgaaactagacatgcttttctagcaatcaacgcagcacgtacgataactgaatttcttttagcttcatataaaaagtaaaagctatttgatgaatagcaatcaaatatattggttataaaaaaccgcatcatcaactgataagcagaagcgtatcataagtaggggggatttatcaaattaattaagcttatcgtgagttgtaacactaatgtaattaaaagaaataattcaagaggtgtgaaaatgaaaatttattataaaacaaaaacaggagataataatactgaaattttaacagttaatgatttgatggatgatcaatttgattgtgaaatggaagtggaaaatatttatgattttcaaaacaaatgtaaagaattaaatcttgaagtggatgacgatattgaggctcgtgtatcaagtttgttagagaacagaattgaagaggttaatggtaatttagaagagtttgaaataaagcattgggtaagtaacagatcttttggagagttaatagaaatgtatgaagaagatgagattactataccaattatgcaaagaaattttgtatgggattctgttcaatgttcaaggttaattgaatcaataattttagggttacctataccaccactatttttaatagaaattgaaagtaataaatatgaagtgattgatggtctacaacgaattactgcaattagtaactttgtgaaacaaagaccttggaattattcaaaggatagaggaaaaaccagaactcctaaagcgagactttctaaattggtagacaaaagtattgctggaaaatcttttgaccaattaagcgaaaatttccaaagaaaaataaaaagaagtactattccattaatagaatttaaacaactaaatccagataattataagtcaaagtatcttatatttgaaagaattaatacgggatcccaaaaattaaactcaatgcaaataagaaaatcactagcttctggtgattttatgattgatttatataaaaaatgcgatgacaataagttattaaaatctatatttactaatacagcattaaaaaaggatttacatgtggaggcctacttaaggacctttgtttttaataaattagttaacaaagattttataacaagtcatcatggaataaaaaatattttgaatgactattgtgagacatatagtccaacctcaatagatcaaaatttcaatgaaaaatttataaaatctttagaacggttatgtatagaatttgaaagttttaaagataatccttttagaagggttttaaaaaaaggaaataacaattatgaatttgtagggaacctaagtgtaacaataatggaatctttgctagctgcgttgataaataatgaagaaaaaaatatcgattttaataaactagaagaattgtataaaatcagaataagtgagttttctgaaataagtaacaatccatttactacatcaacaggtaagcatgattcaattaaagaaaggtttagagtttttaaggaaattgtagatgagtgtattgtatagatatataaatttttatgaatataataaagaattcattgaaaatctaaaagctaagtatttagaattagaagaaattttaaactttatttcagataaaaatcatcatatgaggaaatttatgaagattttaggtaaagaaccaggacattataaaaaaataaccgatgcaatgcaaagggagttgcttataagctgttatgctgtttcagaaaatatgataaaagaatttatatattgcatattagaatataaagaacataagaatgctcatataaacaaatttttagatgataaaattagtgaagatagattctcgccaaacgtaaaatatgaaaatataaaaaaagaattatcaaagtatttttccgaacataaatttatatttaaaaaaactaaacaagaagtgaaatcatacgaaaatttaattagtaataggcattcttatgcacataataataattatagatttgagtataatgattttggagaagcaatacaaacaattgagtatatttattacgagctgtattcggctataaataacttggaattacaaaaaaatataaaagaaataaccagtaaaatagaaaaaattaaaaaaataaacaatatagaacattttaagaaaaagtcaaaagaaataacagtaattaaaaaactttcaaaagaaatagtgaaacaatatgatgaacaaaaaattgacatagaacttataaaaccattaattgatagttttagaaatattgctagactagatttacgaaaaaaaagtgaatctttaagaatgatgaaccatgaactaattaatataaacaatattttaagttaacattatgttaacttaaaatattgtatgagaggagaatatttagaaatgaaatatagatcattcggatggattcaaaatccatcagatttcaataaattaaagaaaacagttgaaatctttgattgtaattctaaacaatatagcttattaaaagaaggattagtgggaaaaaatttaaataactttaaagatattcaaaaaaatttacaaagtaagttagataagaatgttgaagaatttacgtatatggaattagtgggaagaaatataaacaaagatgggaaggttccaaatactcgaaaagaagctgtcccaaatgctttaattcaaatctcattagagtcacaaagtgcaaatactaaaggtaaaaattttacagatgattggacatcagatggttttttaagatgggcagtaagtttaaattttgtcaaacataatatggaaaatgatacttttaaaataactaataaaggaaaagagttgataaatgcagtttcagaaaaagaaatgaataaagttataagtaaagctttacttagctatcctcctgcaactcgagtactagatattctaaatagtaaaaatggagtaacaaaattttatattggtaatagattggggtttaaggatgaacctggattcacttcgtactcagaagacttgatgatagagtgggttaaagaaacagagagtataaaagaattgaaaaaaattcgctctgacgttgaaggtacggcagataagtatgcaagaatgatatgtggatggctaaaaaaggtagattttgttagtcaaaaaaatagtagatatatgtcttcaaagaatacagaagttacaggttttattgagtattcaattacaggcaaaggtaagcacgctttaatgcaatctcaaggaaagtctaaaaatagcaaggtagagaaatatttattatgggaatttttatcagttaaaggagaaggtaaaaattacattagaacaaggagaggaattattttgaagtatttaaaaaattcttcttctctaaatggacttatgaatcatttgaaacataaaggttttgaagaatcattagacgtgattaaaactgacatagaaggattgaataatataggtataagaattgaactaaaaggaaattcaattaaattgttagataagataaacgatttctatattccaaatacaaatttgaaattaactagtagagaaaaaagtagattgaatttaaaggaatattttgtttctaatacaaatcttccaaataaatttattacattattagatttagcatatgatggtaaggcaaatagagatttcgaattaataacttcagaattatttagagaaatatataaattaaataccagacatttaggcggtacacgtaaacctgatatcttaatatggaatgaaaattttggcatcatagctgatactaaggcatacagcaaagggtataaaaaaaatatatcagaagaagataagatggttaggtatatagatgaaaatattaagagaagtaaagattataatcctaatgagtggtggaaagtctttgataatgaaataagttcaaataattatttctatttatggatttctagtgaatttattgggaaatttgaagaacaattacaagaaactgctcaaagaactaatgtaaaaggagcttcaatcaatgtatatcaactattaatgggagctcataaagttcaaactaaagaactcaatgtaaattcaatacctaaatatatgaataacacagaaattaaatttttatagattaatagaggctaaatgcacattagcctctataataaaattatgatgtttattatggttaatctaataatttgaaagtatctttatcatagttagtaattaaaacttcatcgctttgagctcttgttgtattgtaagatgaattatgatagctatgatttaaatggtggacttggacattattctcgtcgataaacttttgtaataatttgttttcaatgtttttgtggtgtagaacgttactaagtgcataacgtatacctctatctgttagagttttcatcaaattatacatttgcttttcttgagatattccccaattttgaaagccacgattaccatcattataactacctgtggttataatatatggtggatcgagataaactaatgcttctttatctaagaaagataaatcgatatcttgaaaataactatcaataaactcgtgatttaaagattttagcttgttgctaaaattcactaaattattcttcatattattactaaaatagcttcgattttttccgaatggattattgaattttaggttgttattaaatcgaatttgatagttatatgaatacgaaattaaaatatataaatcaataggattgggattttgattatattgatttctaaatttaataaaggattgttcattagttttacttaaatttttttctttaattctacgattaatttgacttattaatttttgagaatcttcttttgcaaataatctaaacatctcattaattttaaaattcatatcaataaaaatatgtctagaagcttttacatttactcctacattagcaccaccagcaaataaatcgacaaatgtagaaatatttttagggaataaaggtattatttggtcaagtagcttatattttccacctatgtaattaagtggactcttaatataataattttgagttggattccatttagttatctttccattttgagattcaggtaatttttcttttttacaatctttttttttaatataaaaaaggtattcattaagttctgtttttgtagaagaaatttttgatttatattttctaaaaggtattttaacaaggtctacagaattatttatagagtgttttttcaatagttctaaaatgtcattatagcttataatcccctcatcattataactaagtataagatgtatagtatcaatatttttaataaggtcttctaaagcgttatatgcttttaatttcattgaatattcactttttaaatggctccaatcaaatattttagttttgccctttaaactaggttgattgtttttagctaaattttctaataggtgataattagaagcatattgcctgttattataaggtatatcgatataggtgatatcaggcttaatttttctaataagattattagcgtcctcattataggctttattattttgattattattaacaatcattagaggctttatatttagtggttttaatgcccttttatcccaatgtttcaggaaagctccgtatgtacctgtcgtattacttacaaaaggtatggattctattaatgaagctattaaataatagtattcatattcggttagtaggtcctttttataccaattatcaatagtatttctaatgaaatcaattcgtctaccattatcttcggtaaaatacattgatcctcctacaggtgtatagttttcggtataataattattacgagagtagttgaaagcatgtttatcattgttaaaaaattcaaaagggttgaattcaagtttattaaattcaagtttatcattattttcaatcgtggctttagcatttacaaaactgaaataaagaatatcatttgtaatgactgcataatcgtttttgaaaaatctagcaactgagtttgtaccagcaaataaatctaaaaaagattgttcatttccttgaacatgtctatccaataatttctttatttcgtgtaatagtgatatcttcgagccgatataacgcattttcgcatcctctttcatccatgataatacaataatataacatgtatcacataatttataaagtatcgttattttaatataaatttcaatctttgattttgattacataagttgacccttatagatcttaatagcagtataaaaaagtgcttttttatactgctattaagattgtcatactttcaatttgttctcattttgataatcttttagtctatatgattatccggtaaattcaaatactttagaacgattgtaaatggtgactataaaatatagagaaatggcgaaatgaaaatactgaatttcctacattttttctttagtgtacctggaatggttagcgacttgactggcatttatcatttacaaatgaagttcaatgtgtacttacaacagaatgtctctacaagtgggggttattatcactaactcaactcgcagagacggcttatgcaagatattgagccgccgagtaaggaaccgtacgctcggtggtgtgaaaggaagaataatcaagtagtgattattcttcaactggattaaaattataaaaaatctgactttctatattaaaaatatttacttcgttttataattgcattatgaaaatatatattgaggagttttttaatgagaaagaaaattagaatattattttgttttttacgctcttgtttgtattaacttcatatgcaaaagcagaagatttacatgataaaagtgagttgagtgacttagctttagctaatgcatacggccaatataatcacccatttattaaagaaaatgttataagtagcgaaataattggagaaaaagatttaatatttagaaatcaaggagacaatggtaatgatttgagagtaaaatttgctagtgctggtttagctcagaactttaaaaataaaaatgtcgatatttatggtgcatctttttattataaatgtgaaaaagttagtgaaaatatttccgaatgtctatatggagggactactcttaataatgaaaaattggaacaagaaagagttataggggctaatgtctgggtaaatggcattcaaaaagaaacagaattaattcgaacaaataagaagaatgttacattacaagaattagatattaaaatgagaaaaaattatctaataaatatagaatttattataaagacagtgaaataagaaaaggtctaattgaatttgatatgaaaactcctagagattattcatttgatatctatgatctgaaaggagaaaatgactatgaaattgataaaatttatgaagacaataaaactttaaagtctgaagacataagtcatattgatatatatctatatacaaaataaatttcaccatcgttgttaattaaaaataaaaaagtataaaaatcatttcaaggtgaatactatgaggtcgagaaaaatagacttatacggtatttattatgggtatcaatgtacaggtggtaccaccaaataaaacagttagttgataaacgatataatagtgctatacaggaggcgataacgtgattactattgactcaaagattaacaaacaaatcgctaaaaacctttctcttgaaggtatgtatgttatacgggagcaacaaatacaaattcttcatgcaattaataatgagaaagaaattacaaataaacttattcgtaaaatcgcttttaaataatgaaatatagagcaacttttcaagaagcattaaagtatcttgaaaagttccttattaaataataattgattaaaagttcatacctaaaagactttcacacaaacaaaaaaggaggaacattaaattcctcctcaacctttattactcatactataattcaattttaacgtcttcgtccatttgggcttcaaattcatcgagtagtgctcttgcttctgcaattgattgtgtattcatcaattgatggcgaagttcactagcgcctcttataccacgcacatagattttaaagaatctacgcaagctcttgaattgtcgtatttcatctttttcatatttgttaaacaatgatagatgcaatctcaacaaatctaatagttctttgcttgtgtgttcgcgtggttctttttcaaaagcgaatggattgtggaaaatgcctctaccaatcatgacgccatcaatgccatatttttctgcaagttcaagtcctgtttttctatcgggaatatcaccgttaattgttaacaatgtatttggtgcaatttcgtcacgtaaatttttaatagcttcgattaattcccaatgtgcatctactttactcatttctttacgtgtacgaagatgaatagataaattggcaatgtcttgttcgaagacgtgcttcaaccaatctttccattcatcgatttcatagtagccaaggcgtgttttaacacttaccggaagcccacctgctttagttgcttgaataatttcggcagcgacatccggccttaagattaagccggaacccttaccctttttagcaacatttgctacaggacatcccatatttaagtctatgcctttaaagcccattttagctaattgaatactcgtttcacggaactgttctggcttatctccccatatgtgagcgaccatcggctgttcatcttcactaaaagttaagcgtccacgcacactatgtatgccttcagggtggcaaaagctttcagtatttgtaaattcagtgaaaaacacatccggtctagctgcttcacttacaacgtgtcgaaagacgatatctgtaacgtcttccattggcgccaaaataaaaaatggacgtggtaattcactccaaaaattttctttcataatatatttataccctctttataattagtatctcgattttttatgcatgatgatattaccacaaaagcctaacttatacaaaaggaatttcaatagatgcaaccatttgaaagggaagtctaagagtagtctaaaatgaatgttgtggtaagttgatcaatacaaagatcaaggattatcgtattagatagttcattattaatgatacactacttatgaatatgattcagaattttctttggctacttttacagtaaagcgattttttagttatcttataacaaagacaaatttataaaggtgatattatggaagatttaaagcattctttaaaaagtttaggttggtgggatttattttttgcgatacctatgtttctgctattcgcataccttccaaactataattttataactatatttcttaacattgttatcattattttcttttccattggtttgattttaactacgcatataattatagataaaattaagagcaactcgaaatgattcattaatacgaatgtgattaaacataaaactgaaggagcgattacaatggctactgaaaaagatataaataatttgtttttaaatcatgtgaattcaaatgccgttaaaactagaaagatgatgggagaatatattatttattatgatagtgtggttataggtggtttgtatgataatagattattggtcaaggcgactaaaagtgcccagcagaaattgcaagataatacattagtctccccatatccaggtgctaaagaaatgatattaattccagattttgacgaagcaacaaatctcactgatttatttaagaccataaaaaatgatttgaaaaactaatcattaattgccatactcaactattttgaaaatcatcaatttcatattgtcaatttattgagtatctcgatttattgttatacacaaacagtatttttgttatcatagagttaataaatataataaattgaataagtaactttacaaaaattagaatgatttaattcaatcacaattatttgaaaatagaggtgagcaggtgaacgatatgttaattagtctcgtaaccccagtttttgctttgttagttattggtggtattatttgggtgattatagaaggtatagtacatatttcaaaaaagaataaagcaatcgataactttttaaaccaagttaataaagtaagtgagacatataaattcgctactacttttttatttctaatcttggctacggcgggtatttctcaattttatctatattatatagtatcagcgttacttttttggcttgtcatacttacctttggtattgcaggtatcatttttttaatgccatatggattatgttttctaccgttttataagcaaaaaaagaaaaaacagacatttaaaaaatacatggtttacactacgattggtttgtcaatttgtctaggcttatctctagttttggttcacactacgaaaatttatatggacgaaggtggcgtaagatactattacggtagttttgtaatgaaacaagcgggcggttatgcttatttagctttagcagtactttcaacgttgttaattgttgcgaaaaaagctacaaataaaaataaagaaatcgaaaccgtcgacaatacaaatataatggaaagataattaagggagtgctcattcaggagtgctcttttttgatgttcaaatttagttggaaatgaaggcatagaagaaatttttatagtcatttattggataatgaattatggtcatatcgattaattttattagtgaggattttacaaacatttgttgaataaatatggtaatgataatatatgaatatttttgaaaaaacactaatatgattaaattatttgttaaaatggcattaagtaaaaaacaaacagggaacaaggtgggatttcatgagtcaattgctaaatgatacgttatcggcttggttgttaattgaatctttaagtccaggagaagtaaattttacagcggaagatatactctcagctgaacattttaaaaatggtgcaaagcaagcacaacttcaaagttttgatgaatattttgaaatatggaatgctgaacgctttattatatcagaagaaaaatcagagactggggaacttatatttaaattttatagacattgcttccgctataatgaaattaatttgaaaattcaggatatttttgatgattattctgagattcataatccaaatgggacacactgttatggttacacatttaacacagataaacacggcaaagtgatagttgattctatacatattccgatgattatgagtgcattaaaagaaattgaaaagaacaaaaatgccaatatagaagaaaaatttaatgattctgttgaaaaatttgttcaaaaagtaaaagaaattttagcagatgaaccaattaatgaatttaaattgaagaagatggacaaagcttatgatgagtacttttctgtattaaattcaaagaaagatggattatttggacattatgtagcaatagaatatgtgaaagatagtgatttaccacagccggaatttaacagcttcttcataagtgatattgagaaagcaagaaaatctcccaaccaaactttaattgattacattgaaggtgtagaagaaagtcagcgcatagaagtagatgaaaataaagaaatgtttgacaaatttttacatccttcacgtttgcctgatggacgatggccatcacagactgagtttagattgtctttaatgcaacaacttgctgtaaaccaaattacgagtggtaatgaaagaataagttcagttaatgggccaccaggtacaggtaagactactttattaaaagatatatttgctcatctagtagttgaaagaggtaaagagttagctaaactaaataatcctaaagatgcatttgtcaaaacaaaaattcatgaaacggatgataaatacgtatacttactaaaggaatctattgccaaatataagatggtagtcgcatctagtaataatggagctgttgaaaatatatctaaagatttaccgaaaattgaagaaattataagaaatcccgaaaaatgtaaattccctaaatatgaacagaattatgcaaatttagcacatgaattaaaagattttgctgaaatagctgaagatttgattggtgaaagtgcctggggcttattttctggagtttttggtaaaagtactaatattaaccaagtattgagtcatatgttaaaacaagatgcgaatgatattggctttgctaaattactacaaaatgagaataatcgtatgagttataacgagttaatgagtgaatggcaatcacatcaacgtgcatttttagaagagttgaggcatgttgaaatgttaaaagaagaatctattagagcatatgatgtttataaaaattgtgagtctttctctaagattgaacaggttattaatagtgaaaaaacaagtattgaagaacaggtatatcatttagataatgaaacgttacgagacaataaagaaatagaagatttggataatcgaattaattatattgttaagcaaatagaaactttaaatgagttaattaaatccatcaaagaaagcaacaaaggttttattaacaaactgaaagcgatgtttaattcagaagaagatgaaagctataaagatcataataaagagaagcaacaattattaacacaacagttagagttagagaaatgtaaaaaaaacaaacatgaagaccttgttagcaaactaaaagaaaaagagaaattaattaaacaattaactaaagtacagttgcaattagacgagttaaattcacagttacaagagttagaagcatatcgtattgagtcaaaaattacaattccagaaaaagatttttggagtgacaacaattatgatgagcgccaagttactaatctgtggacgagtgacgaacttcaatacagacgtgccatgctctttttaagagcaatgatattgcataaattattattgattgctaataatacaactatttattatgcgattaatgattttaaagatagaaggaaattaattgatgcaaatccagataaagtacacaacgcatggaatgtgatgcatttaatatttccagtagttagtacgacgtttgcaagctttaaatctatgtatgggggcataccaaaagatttcatagactacttatttattgatgaagcaggacaagcaatacctcaagcagctgtgggagcattatatcgttcaaaaaaagttgtagctgtaggtgatccgattcaaatagaaccggttgtgactttagaaagtcatttaattgataacattcgtaaaaattatcatgttccggaatatctagtttctaaagaagcttctgtgcagtctgttgcagacaacgccaatcaatatggtttttggaaatctgatgctactgatagtaatcaaaaaacctggataggcatacctttatgggtgcacagacgatgtttaaaacctatgttcacgatagctaaccaaatcgcttataataataaaatggtgttgccaagtaatattacaaaagtaggtaaaacaggttggtatgacgttaaaggaaacgcagttcaaaaacaatttgtgaaagagcatggtgaaaaagtagtgggattattagctgatgattggattgaagcaattaaggaaggtaaaaatgaaccgagctcatttgtaatatcgcctttttcagcagtacagcaacagattaaacgtatgttaaagcaacaactaccgactagaattgatattgaacgtacaaaaattaatcaatgggtcgataaatccattggtactgttcatacttttcaaggtaaagaggctcagaaggtgtattttgtaataggtactgataatacccaagatggtgctgtgaactggtcatgcgaaaaaccaaacttgttaaacgttgcagtgacaagagctaagaaagagttttatgtaattggcgacatgcaaagaatacagatgaaaccattttatgagacgatttttaaagaaagaaatgtaaaataacatacaaaaaagtatatagaggaagttatacattttaaaaggagcaaaattgaataatggagaaatttaacaactggatattaaatgcaataagtggatctcaaacagacaagaatgaaacaactgaagaattaaaaggggcaaaatttatcattttatatgcatattcaatgctcgttttgcttgcgttagtaatttctaacatattcattcacattttggagcctaaactatcaatcaccactcaaatcatcatcgttttgattttaattgaagcactaattggactgcgtttcttgaaagcgtacgatgttaagcgtggcaaagataaagaaaataagaaaaatagtaaggatttcgttaaactaaaatcaattttagtagcaattttatttacatcattggcgctgacagcaggtactgtagctgatatatacggtttcactgacttaggaaatactagaagtgatttaatcgtttggagcataggtggtattatatttggcctcgtatgttacacaatggaagataaaaaataacgataaggagctggcgattataaagctagctccttttttaacttatatatgtaaagcactatcctaagggtctttaatcatatgtcaataattcctataattaatactcttaaatattgtttaaataagttttaaaattttacacatatttttatttaaaaaagatgtataattaatgtattaaatatagaaagaagttgatattatgaaaaagtgtattaagactttgtttttaagtatcattttagtagtgatgggtggttggtatcattcagcacatgcgtcagattcgttgagtaaaagtccagaaaattggatgagtaaacttgatgaaagcaaacatttaactgagattaatatgccaggctcacatgatagtggctcattcactttaactgatccggtaaaatcggtttgggcaaagactcaaggcaaagattaccttactcaaatgaagtcgggagtcaggttttttgatattagaggtagagcaagtgctgataatatgatttcagttcatcacggcatggtttatttgcatcatgaactaggaaaatttttagatgatgctaaatattacttgagtgcttatccaaacgaaacaattgtgatgtctatgaaaaaggactacgatagcgattctaaagttacgaagacatttgaagagatttttagagaatattattataataacccgcaatatcagaatcttttttacacaggaagtaatgcgaatcctactttaaaagaaacgaaaggtaaaattgtcctattcaatagaatggggggtacatacataaagagtggttatggtgctgacacgtcaggtattcaatgggcagacaatgcgacatttgaaacgaaaattaataatggtagcttaaatttaaaagtacaagatgagtataaagattactatgataaaaaagttgaagctgttaaaaatttattggctaaagctaaaacggatagtaacaaagacaatgtatatgtgaatttcttgagtgtagcgtctggaggtagcgcatttaatagtacttataactatgcatcacatataaatcctgaaattgcaaaaacgattaaagcaaatgggaaagctagaacgggttggctgattgttgactatgcaggatatccatggcctggatatgatgatatcgtaagcgaaattatagatagtaataaataaggattcaataatgatattaagacgagtatgaaaatagtagattctaattattttcactactcgtttttattttgaaaataagtaataattcaacaatattataaattgaaaagattgtttatggaatttttgataatattaaagtgaaaaagtgttataaattgataaatgtaattaacaaaaacaaatcattttaaaaagaagagagttgtaagatgatgaaacgattaaacaaattagtgttaggcattatttttctgtttttagtcattagtatcactgctggttgtggcatgggtaaagaagcggaaattaagaaaagttttgaaaaaacgttgagtatgtatccgattaaaaacctagaggatttatatgacaaagagggctatcgagatgatcaatttgataaaaatgataagggaacatggattgtaaattctgaaatggttattcaacctaataatgaagatatggtagctaaaggcatggttctatatatgaatagaaataccaaaacaacaaatggttactactatgtcgatgtgactaaggacgaggatgaaggaaaaccgcacgacaatgaaaaaagatatccggttaaaatggtcgataataaaatcattccaacaaaagaaattaaagatgaaaaaataaaaaaagaaatcgaaaactttaagttctttgttcaatatggcgactttaaaaatttgaaaaattataaagacggagatatttcatataatccagaggtgccgagttattcggctaaatatcaattaactaatgatgattataatgtaaaacaattacgcaaaagatatgatataccgacgagtaaagctccaaagttattgttaaaaggttcagggaatttaaaaggttcatcagttggatataaagatattgaatttacgtttgtagagaaaaaagaagaaaatatatactttagtgatagcttagattataaaaaaagcggagatgtataatcatggctcaatcagaatatgaaatcaatcccggaaaaagagagtgatgaaatgataaaacgtgtaaataaattagtgcttggtattagtcttctgtttttagtcattagtatcactgctggttgtggtacagggaaagaagcggaaataaagaaaagttttgaaaaaacattgagtatgtatccgattaaaaatctagaggatttatacgataaagaaggctatcgtgatgacgaatttgataaaaatgataagggaacatggattgtaaattctcaaatggcaattcaaaataaaggagaagctctaaaagttaaaggtatggtcttatatatgaatagaaataccaaaacaacaaaaggattttactatgttaatgcagtaaagaaagatgaagatggtagacctcaggataataaaatagaatatccggtgaaaatggtagacaataaaatcattccaactaaaggtatcaaagacgaaaacataaaaaaagaaatcgaaaattttaagttcttcgcgcaatacggcaactttaaaaatttgaaaaattataaagacggagatatttcatataatccagaggtgccgagttattcggctaaatatcaattaactaatgatgattataatgtaaaacaattacgaaaaagatataatataccaacgaataaagcaccaaagctattgttgaaaggtacagggaatttaaaaggttcatcaattggctacaaaaaaattgaatttactttcgtagagaaaaagggagaaaatatatactttagtgatgggctacaatttaacccaagtgatgataaataatcatgattcaaattgatctaggaaaaataagttgagaatagtcaaattataattaatctactactcgtgttatttgaaaataagtaaaaatctaaatgaataacaatatttttagtttaatagattgcttgtataatttttggtaatattaaagtgaaaaagtgttataaattgataaatatatgtaattcacaaaaacaaatcatataaaaagaaagttgtgatacggtgaagcgttttaaaaaaatagttttatgtattagtttactatttttaacaatttttattgggggttgtggcatgggtaaagaagcggaaattaagaaaagttttgaaaaaacattaagtatgtatcctattaaaaatctagaggatttatacgataaagaaggatatcgtgatgatcaatttgataaaaaagataagggaacatggattattggttctgaaatggcaactcaaaataagggggaagctctgaaagttaaaggtatggtcttatatatgaatagaaatacaagaagtgcaaaaggattttactatgttaatgcagtaaagaaagatgaagatggtagacctcaggataataaaatagaatatccggttaaaatggtcgacaataaaatcattccaactaaagatatcaaagacgaaaaaataaaaaaagaaatcgaaaactttaagttcttcgcgcaatatggcaactttaaagatttgtcgaagtacaaagatggagatatttcatataatccagaggtaccgagttattcagctaaatatcaattaactaatgatgattataatgtaaaacaattacgaaaaagatatgatataccaacaaataaagcgccaaagctgttgttgaaaggttcgggagacttaaaaggttcatcagttggatataaagacattgaatttactttcgtggagaaaaaaggggaaaatactttttttactgatagtctacatcttgaaccaagtgaggataaataattatgactaaaaaagagtatgaaatcgattccggtaaaataaagagtaatacggaagaaactagcgcaatagctaatatcagttatgaaattgaaaatgcaaatgacaatggtttagatgatgaaaaaattaatgttcagattgataaattaaaaagtcataaaaagttccctaaaaacttagactacattgaaagttatacagatcccagtacggggacgacggcaacggcatttttaaataaagatacaggtaaagttactgttggaatggctggtacaaactttcacggcgatcaacttaaaagagtagcacttagttcgatgtctccgttattattcccaccctctaagcaagatatgaaagatgtacgaggcactatgaaggatggtgtagcggatttagccattggagtaggaatggtcaattataaaggaaaacattttgcaaatacacagcagtttattgagaatttacaaaaaaagtacgaaattgataccgttactggtcattctttaggagggagagatgctatctttcttgggcttcgttataacatcaaaaatgttgtggcatacaatcctgctccgttagaagtaaaaagcattcgtaataaatttggtggtcaattgtttagaaatacgacatttccagatgaaaaatatttaaaagagttaatggataattatgatggagatattactaaggttataactcaaaaggatggattagactatttagtgaagcgtacagatcatttaacttgtggcgatgtgttacgtataaacaatggtcagggccatgcgatggagaattttttaggagaaaaagaacaacgtgaaataatcgaagaactaatgttagtaaaaggatatcgcgatgcaaatgacaaagcatttaaggctttgaaaaaaaatactgagaaaaaactcggtaaaatagatgaaataaaatcgaagttactgcaaacgaacggtggcgccctctcgtcttctcaacaaaaattgcttgaaactttagtggcattttcggtagctgaaggactaagtaaaatggttgaccaagaacttcagcagttgaaaaatatgttcaatcttatggatgagaaatttgaagcaaattggaaagacgcacaagaagctagtgatattgtaggtaaacatctttcatacccagaaaaggtaagtgcattagataatggtggtgttaatgaaagtaaacttgctaccgaaccacataatgaaataaaagacaaactaaataaaattacggacttatctaagaaatataattcgtatttacagcaaatcgaaaaaagtattaatgaaatagttgctaaggatcaacaattggcagggcaaataggtgatttaatatgatgtttgaagaatacaagaaaatagatgatcttgaaaatgcatatgaaatagagttgaaacgtattgaaagggagatacaaaatcttagtgatttaaaatatcaccttagaagagaaaatgaacaaagttatgatgcatttttgtatttaaagaataaaatgaactatggtgaagagtcaaatgctaaggtgagacgactagttgaagaatttgattatgaagcagatacttatattagacaaaaagagttaaagttagaagattataaagaagaaataagaagagaatatatacagcaatctgaaaaaataatggaggcgaagtagcttatgggaatccctgatccgttatctaatcctatgtctgatcctttactaggagatagttggatggtaggtgatttgaaaaaaagacaggaaaaaaaactaatcacaacagtcatcgcacctgaacatgatgaaaagcatcgtgaaaataaaagtaaaatgaaaaaatctgaaaagcaattgatcaatcagttaattaatcatggccatacatttaagagtgattttaaaaatgtagctaaaggtgattgggttaataaagccatgcaagacttagataaattaggcaatgagcttaaaaaaataatgaattagttgaattgtcacatactttttcaaaccaacaacgaactaaaaaatctatataaatatgattaaaagaagtcataaccattcgtaaaggatggttatttttaatagtaaacaaagttgctgctaacttacatcttgaaccgagtgaggataaataatcatccacacacacgattcaacacgaatttcaaatatattgctgtaaaataatgtaaaataaacgtattcatattactgaattgagggatagtatgcaacgtgattatttaattcgagtagaaactgaaagcatgccagatttcaaaaggctcaatggtttaatgattggttttgttattaaaggtgaggcacatatttatgatgaaaataatatgacgcaatgcaacaatggcgacattttcattattaaccaccgcgacttgtatcgatttcaacttcaacaagatggcatcatatgttatatccaattccaaatgaaatatttagcagacaagtttgatgatgcgcattgtctatattttcacttaacagatgcgaccacaacaaagaatatacatcaactgagaaatataatggcaagactggtttcaacacatatccgacataatgagttgtctaaattgactgagcaacaacttgtgattcagttacttatgcatatgattcattatgtcccgcgtacatatcattcgaaccaaagtatcttaaatgatgataaagtgaatcaagtatgcgactatatcgagttacattttcatgaagatttaagcctttcagaattaagcgaatacgttgggtggtcagagagccatctgtctaaaaagtttacagaatcgctaggtgtaggattccaacatttcttaaatacgacgcgaattgagcatgcgaaactcgatttaacatacacagatgaaacgattactgatattgcattgcaaaatggcttttcaagtgcagcgagctttgcgagaacatttaaacactttacgcatcaaacacctaaacaatatcgaggtgatcgtccagcaatcactgaaaaccagcaatcggcacaacatgattatcacgaccgtgaattgatattacttttaaatgactacattgaagaaatgaatcattttattgaagatattgaaaagatgaactataaagagattgcctttaaaccaactaatcaacaactaaatcaatttaatcatattattcaagtgggctatttgaggaatttgctcaatacacagtatcaatcacagttgcttacatgtcatcatgattttcaagtcaatgaagtattagcatatgatgtgatgccatatattatgaaaaagctcaatgcgccattcacgtatgatgcagagatttcgaatatattttatgatatcgatttgtgtttagactttttattagatcataattttagtctaaccatgcatttgaatcagtatgactcacgagattatatcgatgcattcaaagtatttatccatcacgttgccctgcatgtcagtcatagaaaagatttgaagttcaacttgtatgtgacgacattgcacaatgctttgattgaaatgattgattattttaaagcgttattccctaatggtggcttgtacattcacttagatcaagctacggaaagacatctaccattgttgaaacgacttgagccacacaatgaccattttgtatttgatgccaattcaaatgatgctgttgattttaataaaatgaatgatgatgaatttaaaaccgcgagtcaaatgattattaataaaacgaattaccttatcgacttaatacatcgtcataacctaaagcgtccactcattttactcaattggaatacattgacgggtgatacatttataaccaacggcgaatattttagaggtggtatcatcattgagcagttattaaagttaagctctaaagtagagggtatcgggtattggttgaattatgatttgcacgttagtcattgtaaaaatgaacgggattatatgaattctattgaactgtttcatcaatataatggaaaacgtccggtctatttcacggcattgctatttaataaattaacaagcaatattttgtattctgatgatacatgtattgtcacgggaactgattcaaattttcaaatattgttatatgatgcaaagcattttaatccgtacttagcgttggacaatcaaatgaatatgcgtgcaacggaaatgatccatttgaacattaatgccttggaagaaggtatgtataagattaaacattttaccttagataaagaaaatggtgcgttatttaatctttggcgcaaacatcatacgatacatggcatggacaaggactctatagattacgttaatcgaatgagttttccgaaattagaagtatatgatatagatatcacggacacactggcattaaacattaaaatgattacgaatgggattcacttaattgaagtaaaacgttacccaagttcataaaatgatcacaaatcacaaattttgatatacataatttgtgattttttatattcaaagctaaaattgcaaaaaattaatggttaacatctctgttgttggcaatataaataatgattaatcatttatgatgtaactaaggagatgaaggatatgaatcaacaattaattgaaactttaaaatctaaagaaggcaaaatgattgagatcagacgttatttacatcagcatccagaattatcttttcatgaagatgaaacggcgaaatacatcgctgaattttacaaaggtaaagatgtggaagtagaaacgaatgtcggaccacgtggaattaaagtaacgattgattcagggaaacctggtaaaacattagcaatccgtgcagactttgacgcattacccattactgaagatacaggattatcttttgcatcacaaaataaaggtgttatgcacgcatgtggtcacgatgcacatacagcatacatgcttgtattagcagagacgcttgctgaaatgaaagatagttttacaggaaaagtcgttgtgatacatcaaccagctgaagaagtaccaccaggtggtgctaaaacaatgattgaaaatggtgtattagacggtgttgatcatgtattaggtgtacacgtcatgagcacaatgaaaacaggtaaagtgtattacagacctggttatgttcaaacaggacgcgcattcttcaaattgaaagttcaaggtaaaggtggtcatggttcatcaccacatatggccaatgatgccattgttgcaggtagctacttcgtcacagcgttacaaacagttgtatctagacgactaagtccatttgaaaccggtgttgtcacaatcggttcatttgacggtaaaggtcaattcaatgtcattaaagatgttgttgaaattgaaggtgatgtacgtggattaacagatgctacaaaagcaacaattgaaaaagaaattaaacgtttatcaaaaggattagaggatatgtatggtgtaacttgcaccttagaatataacgatgattatccagcattatataatgatccagagtttactgagtacgtggctaagacgttgaaagaagcaaaccttgattttggtgttgaaatgtgtgaaccacaaccaccttcagaagactttgcatattatgctaaagaacgcccaagtgcctttatttatacaggtgcagcggtggaaaatggtgaaatttacccacatcatcatcctaaatttaacatttcagaaaaatcattacttatttctgcagaagcagtagggacagttgttttagattaccttaaaggagataactaacatgaatgaaacgtatcgcgggggcaacaagttaatcttaggtattgtattaggtgttattacattttggttgtttgcacaatcacttgtaaatgttgtaccgaatttacaacaaagttttggtacagacatggggacaattagtattgcggtcagtctaactgcactattttcaggcatgtttgttgttggagcaggtggtctggcagataaaattgggcgcgtgaaaatgacgaatatcggtttattattaagtattattggttcagcattaattattattacgaatttaccggcattattaattttaggtcgtgttatacaaggtgtatcagcagcgtgtattatgccttctacattggccattatgaaaacttattatcagggtgctgaacgtcagcgtgccttaagttattggtctatcggttcttggggtggcagtggtatctgttcactcttcggtggtgcagttgcgacaactatgggttggagatggattttcatcttctcaattatcgttgccgtactttcaatgttactcatcaaagggacgcctgaaacgaaatcagaaattaccaatacacataaatttgacgttgcagggctaattgttctagtagttatgttgctaagtttaaacgttgtcattactaaaggtgcagcacttggttacacatcattatggttctttggtttaattgcaatcgtaattgtagcattctttattttcttaaaagttgagaaaaaagtagataatccgcttattgattttaaattatttgaaaataaaccatatacaggtgcaacgatttcgaacttcttattaaacggtgttgcaggtacattaattgtagcgaatacattcgtgcaacaaggtttaggttatacagcattgcaggcaggatacttatcaattacttatttaatcatggtgttattgatgattcgagttggtgaaaaattattacaaaaaatgggttctaagcgaccaatgttattaggtacattcattgtggtcattggtattgcacttatttcattagtattcttaccaggcatattttatgttatcagttgtgtcgtaggatatttatgtttcggactaggcttaggtatttatgcaacaccttctacagatacagctatttcaaatgcaccgttagataaagttggcgttgcttcaggtatttataaaatggcttcatcacttggtggtgcattcggtgtcgcaattagtggtgcagtatatgccggtgcagttgctgcaacgagcattcatacaggtgcgatgattgcactttgggttaacgtattaatggggatcatggcatttatcgcaattttattcgcgattcctaatgatgataaacgtgtcaaagatgcgaaataataacgatgacacgcccagtgttttgataatgatttaaatgaaagtaaagcaaattaaatgaggaaatgtatagagcagtgcatatagataaatctatgattggattaacactaatataaatataaatgaaaaaccatccacttaaacttttgataagttaggtggatggttatttattgcgttgttctaaaaatttggacatttatatggaaagaactatatataatgtgaaggttatggcaattcgcttcaatgaaggcgacgtgtaaaagtgtatattaaacgtttcggggtcagactccgagaatagtgtccgtcatgcttaccgcatactaatgaagcattattatatgagtgtttatagccgatttaagataataaattttgctaaatataaaagagcttgtgacattcaataaaaatcgaattatcatcaataagattttgctttaaacattgactatgaaactggataaataaagattcaattaatgcatcagtattaggatttactctaaaacgattaatagttttataagaaggtgtttgattttgagctaaccacatcattcgaatactgtcatgaagtaatttctctattctacgaccagaaaatacagattgagtgtatgcatataagataatttttaacatcatttttggatgataggatgttgcgccacgatggtgtctgaattcatcgaattcactatcaggtatcgtttcaacaatttcattaacatatcacgaaatatcattttgaggaattctaacagaagtttctattggtagtgtaagttggacaaagtgtcttattttttaaagtatttaaaagtaaaattacatgttaatacgtagtattaatggcgagactcctgagggagcagtgccagtcgaagaccgaggctgagacggcaccctaggaaagcgaagccattcaatacgaagtattgtataaatagagaacagcagtaagatattttctaattgaaaattatcttactgctgttttttagggatttatgtcccagcctgttttacatgcatctgaatctctaattttaaaaaaatatgaatataaataagacagtaaaaattaaatttcagttgttgcaatttcttcatctgtaggtacatcatcgttaaggccaacaagtgcttcagaaacatttcgtgaatgataaccgatacgttcaagaacaccaatcatatcgatatatagtaatccgccttttgttgtacattcaccacgattaaggcgtttaatatgacctttgcgtagtttatgttcaatattaaatgattctctactacgttctacaatttcatcttttttcgttttgtcataaacatctaacatgtcgatggctttatcaaatgactcagcaacatggttgaataatttatccataccgcgttgtgcatcttctgtaatgcgaatatcttcatcatgttggcgttttaattgagcgacatactcttctgttagctctgctacttttaaaatagagcgattgacatcaaacataactgctaaacgctcaacgtctgccttcgtaatggcttttgtagaaattctaactaaataatttcgaatgctatcattgattgtttcaacagcttggtgcttttgttcaagctttttgatcaattttttatcgtcttttgtaatttcgcgaatgtcttcaaacatcgttaagacaatctgacccacattttgtaattctttttgagtttcttgtaatgcaacaccaggtgcgtgataaacaagatctttgtttaagtgctgaggtttatagtcatcagcaatatctttacctgggacaagctttgtaactatccatgctaaacctgctacaaatggtaattgaatcaaagtatttgttatgttgaagataccatgtgatactgcaatcgtcatcgctggttttaagtgccatacatcttgtaacaaactaatcaaatgaatcacaactggcaagaaaattgtgaagataattaccccgattaagttaaagatgacgtgtacaagcgccgcacgttttgcagcgattgagccggctaaactagctaagatagctgtaatcgttgtaccaatgttatcgcctagtaacacagggattgctgcgtttaagctgattaaatcttgttgataaaattcttgtaaaataccaatcgtcgcacttgaactttgaactagtgctgttaaccctgcgccgacaatgacagcaagtattggatttgatgacatatcaagcattaattgtttaaatccatctaatgatgctaaaggtttaacggcatcacccataaattctagaccgaagaatagagaaccgaaaccgaatagtatgcggccaatgttattgattttagagcgtttaaagaaaaagattaaaaatgcacctaatgctaaaattggcattgcatattcgcctaaatctataccgataataaatgcagttaccgttgttccgatattagcacccattatcactccaatggcttgtttcaatgtcataaatccagctgttaccagtccgattgtgataactgtcgtacctgaactactttgtattaaaatagttacaacgatacctgcaataacacctaatactggatttgatgtaaatttgtttaaaatatctcgtagcctgtctcctgctgatgcttgaagcccgtctcccatgatttttaagccgtaaaggaaaatacctaaaccacctaaaaaggagaaaatgacttctgtaaccgacatttccattatttcacctcaaataagctttatatttagattatcgcttataattgtaaatttaatgttaagattaggtaaaattatttaacaatatatgttatttgtatatgacttgtaaaatatcgtcacttattatgtaaattttcagtgtgaaatggcaggtttgcaatcacttgtttaacaaaatgatgcaatcaatcatgtaattatgtttcatcaaaaaatcatgagagtgggataacgaaataaagtttgtaatcatatcacttctatcccactccatgatttgaaatcaccatatagacagatttaatgtgcctcgttataataatttgtgttcttttaataatgactcaatgtacgtaccttttatctttttaaggaatcctgctaatgcgagtttttgcattttcgaatctttagtaatctcgcgcaaatcttgatggtcattcagttcgtatacggcatccattaagacgcgaagatcaaatgtactattgatgacctctggaataccacgatctatatttagtaattgataaacagcttccatggcagtacgaaccgaatattctgttgtaaatacagtgtctcgctctgtttctgcaaagttaccaataaatgctaaattttgtgattgatgcgggacgactaaaggtctgtcgccgatagcacgcgtcatgaaataagaggtgatatatggcatataaacaggaatcgtattagatgcatgttttgctaagtcttcaattttgtcagttgatacacctaagtgatacagccattcttggcatatttcattaccactacattctgtaattggctttttaatataatcgccgtttacatctgaatataaggcataaatccatgtagatatttcattttcaggttggtctttaaactgttgctgacgattgattgtaaaactgatttgccatgcagaatcattgattgtaataataccgccagtaaccgttttgcctgcaagtggatcacgtttacaaatgctttctattgtatcgataatatctttattgtttgttgtcgatgttgctgaaacaaaccaactttttttaggaatattttggcaaaacttttcaggattaccaaattcaggactttgtcgcgctaaatttttccatagtgtccaactaccacctaattcgtcagttggtggtgctggtgtatcattatcaccatacgtagagctttccgtaatactaccgtttgtcacaaagacaagatcatctacagtcagtttaatggactctgctttgccatgtcggtgaattaatatttctcgggcaattttttgacttgtcgtaacatctactttaatatcttctacttttacaccgtattcaaattgaaccccatgcgattttaaatattcaaccataggtaatactaaagattcatattgattatatttagtgaattttaaagctgaaaagtctgcgagaccaccaatatgatgaacgaatcgcattagatagcgacgcatttccatagcagaatgccacggttcaaatgcaaacatcgttttccagtaaatccaaaagtttgaattaaagaagtcatcggaaaatacatctgttattttgacatcatctaaatcttcttcattcgttaagcataaatctaaaatttctttaatcgcttttttggtcaaagtgaagtctccatcggtaactaaacgttgaccctgtttttcaataactcgacagcgagaatagttagggtcttctttgtttagccaatagaactcatctaatacagacgcgttatcgatttctaatgaagggatagatctgaataagtcccacaaacattcaaagtggttctccatttcacgaccacctcggacaacatagccttttaaaggcatattttcaccatcaagactaccacctgctttaggtaactcttctaaaatatgaatcttcgaaccttccatttgaccatcccttattaaaaaacaagctgcagcaagtgaagctagaccagatccgattaagtaagcggatttgttttctacattttcaggttttttagggcgcgcaaatgcttcataatttccataactgtaatacatatccaccaagtcctttcgtattagaatacactcagactatacccctttgtgaattgcaaatattagtatttatattggtaaatttgacgaaattagatcatttttatatttttgatttttaaaattttatcactcgaatgtttttggattctgaggtgcgggacttggaataattcgaatcattatgtggcatgttaaacaggtaaatataagctatgcacatttaacaagcggatactcctgacgcaattatagtatcattacatattgtttaatcgtttggggtaatgtaattaaaaggtaaaataggcagagtgttatacataaaatgtaaagaaagaggcgatagaatgtctaaaatcaggtcttttacaatattaagtctacttatttacttagctatgatgtgctatacagtagtgacctattcaaaattaccaaccaaagtacctattcattataatttagcaggggatgctgataactttgctgataaatgggtgctgcttttgattaatagcgcatttatagtgatttggcttatatttttcattgcaggtagatactatgaacgatttgccaaatggtcacattataatcatacaccacgtgaaattcgagcgattaaattatttttaagtacgttaaatttagagattatgagctatatgtctatcttcacagtattagaaatttggcaaatacaacaccatcatcaattcaatttactatggtttaatatgatatttatcattatcattggtttgacgcttgtcatattttgtttacttcctacaattcataaaatgagagattctcaataaaaatataaactgtcatgatgcagttttgaagcggattcctgagattattataaataatatctagtatttataattaaaatgatatattatttattatagttaaatattgtgtatattttgtgaactttttgtaaaaattcgattgcctgtcacatataggagtgttacattttaaatatgtgatcatcgcaaaatataagttgaaataggttgtagattaatcagaatgataaatattttatataaagagagggagtcattatgacactacttactgtaaatccattcgataatgttggattatcagccttagttgcagcagtacctattattttatttttattatgcttaaccgtttttaaaatgaaaggcatttatgcagcattgacaactttggttgttacattgattgtggctttatttgtatttgaattaccagcgcgtgtatcagcaggtgcgattacagaaggcgttgttgccggtattttcccaataggatatatcgttttaatggcagtttggttatataaagtttctattaaaacaggacaattttctattattcaagatagtattgcaagtatttcagaagaccaaagaatccaactattattaattggattttgtttcaacgcatttttagaaggtgcagcaggatttggtgtgccaattgcgatttgtgcagtattattaattcaacttggatttgaaccattaaaagcagcgatgttatgcttaattgctaatggtgcggcgggtgcctttggtgcaattggtttaccagttagtattattgatacgtttaacttaagtggaggcgttacaacattagatgttgcgagatattcagcattaacacttccaattttaaactttattatcccatttgttttagtattcgttatagatggcatgaaaggtattaaagaaattttacctgtcatcttaacagtgagtggtacatatactggattacaattattattaacaatattccatggtccagaactagcagacattattccatcactagcaacaatggtggtgttagcatttgtttgtcgtaaatttaaaccgaaaaacattttcaggttgaaagaatcaaaacataaaattcaaaagcgtacacctaaagaaatcgtctttgcttggagtccgttcgtcattttaactgcctttgtattagtatggagtgcaccattctttaaaaaattattccaacctggaggtgcgcttgaaagtttagtattaaaaatgccaattccaaatactgtgagtgatttatcgcctaaaggaattgcgttgcgtctcgatttaattggtgcaactgggacagcgattttattaacagtaattattacaattttaattacgaagttagaatggaaaagtgcaggtgctttattggtcgaagcaattaaagaattatggttaccgatccttacaatttcagcgattctagctattgctaaagttatgacatacggtggtttgactgtagcaattggacaaggtattgctaaagctggagcaattttcccattattctctccagtattaggttggattggtgtgtttatgactggttcagttgtaaataacaatactttattcgcacctattcaagcgacagtggcacaacaaatttcaacaagcggttcattacttgtggcagctaacactgcaggtggtgtagcagcgaaacttatttcaccacaatcaattgccattgcgactgcagctgttaaaaaagttggtgaagaatctgcattattaaaaatgacgttaaaatacagtattatatttgttgcctttatttgtgtttggacgtttatactaacgttaatattctaaatataaataatgttgtcacttggattcaaatgacattttaaatctaattattcatgaatcgaactagtacgaaatgcaatgagcatcttgtctagttcgattttttaatgtctaaaaatgtcgtatatgtaatcagagtagaaagtgttgaggcgtttcagaagttgtttagaaaagtaagtaaaataaaaaatgcactgagcaacaaaagatgttgctcgtgcatttagatgattcttatcatttcaaataagaatgtgttaatcaacgtatataagttaaaattggtttggataaaatgatatctatcgttgtgtattgtttgtttttatagttcgcgacgacgtccagctaataacgctgcacctaacgctaatgataatccaccaaatacagttgtaccgatgaatggattttcttcaccagtttctggtaatgcttgagctttgttagcatctgcatggtttgctggttgcttcttatcaacaacaagttcttgaccaggtttgatcatgtttttatcagctaatttgttatctgcagcaattttgtcagcagtagtgccgtttgcttttgcaatgtcatttactgtatcaccaggtttaacgacatgtactccgttgccgtcttctttaccaggttttttgttgtcttctttgccaggcttgttgccatcttctttaccaggttttttgttgtcttctttaccaggttttttgttgtcttctttaccaggcttgttgttgtcttctttgccaggtttgttgccgtcttctttaccaggtttgttgttgtcttcctcttttggtgcttgagcatcgtttagctttttagcttctgctaaaatttctttgctcactgaaggatcgtctttaaggctttggatgaagccgttacgttgttcttcagttaagttaggtaaatgtaaaatttcatagaaagcattttgttgttctttgttgaatttgttgtccgcttttggtgcttgtgcatcatttagctttttagcttctgctaaaaggttagcgctttggcttgggtcatcttttaagctttggatgaaaccattgcgttgttcttcgtttaagttaggtaaatgtaagatttcatagaaagcattttgttgttctttgttgaatttgttatccgctttcggtgcttgagattcatttaactttttagcttctgacaataggttagcactttgacttgggtcatcttttaagctttggatgaaaccattgcgttgttcttcgttcaagttaggcatgttcaagatttcatagaaagcattttgttgttctttgttgaaattgttgtcagctttcggtgcttgagattcgtttaattttttagcttcacctaaaacgttagtgctttggcttggatcgtctttaagactttgaatgaaaccattgcgttgcgcttcgtttaagttaggcatgttcaaaatttcatagaaggcgctttgttgatctttgttgaagttattttgttgcgcatcagcttttggagcttgagagtcattaagttttttagcttcacctaaaacgttagcactttggcttggatcatctttaaggctttggataaaaccattgcgttgatcagcatttaagttaggcatatttaagacttgataaaaagcattttgttgagcttcatcgtgttgcgcagcatttgcagcaggtgttacgccaccagatataagtaatgtacctaaagttacagatgcaatacctacacctagtttacgaattgaataaatgtttttctttttcaaattaataccccctgtatgtatttgtaaagtcatcataatataacgaattatgtattgcaatactaaaatctatatttataattaaatttaaagttaagttttacaacttataaaataaatatttttctgaaagatttattcaggaagtaaaaggcttaaaaccgcaaaatcacgctatttcgattaataaaaacagataaaatatagagatattttttataatgaaagcggtttaatacatatgagttaaaaaatatttttaagaataaagtggggctttgaatgtgctgaggtttaatttcggaaatggttttaagtgatatagaaaatagaaagttgttcattatgtgctgaggttttattaaaaaatagaaaacacaagtgcactttagaatacagcacacttgcgtaatagagatattattcaaaaacaagatgtaaatgatctttatctgctaataattgattcacttgagctaataattgttcagcatggtcttgctgcgcgtcatccatatgaattaaaatttttctttcatcttcagttgagcgttcttttattagatagccttgcttttttaaattattgagagctctaacagtttgagggtatttatggtggattgtttcaattaaatctttaagaagaacgatgtttttattttgagaagtgataatagctagaattgtgaattctacaaaacttaatgttagatgttttttgataatattcttgaaatacattgtatacatcatcaagtttagaaattctttactatcttttggtatcatctgtgattcactttgatctgcaaggttaaagtgtttaatgatttgatcaaacaatgtaacacgttctgcaattttctctcgttgttcttcagatattgaaatgtaagtattacgctcatcaattttacttcgaactttactaatatatgaatgtttcacaagtacttttatatgctgtactaaatccgattgtttataacataaatctgaaacaatcttcttaaatggaagtgtgttttcttgctgatgaaataaataagtcagtaatataaattcttttatagtcatatcgacttcaggcttgacttttttcttaaaacgaaacatatatgcttcaatgattataaaatctctaattttgtcatggttattatatttcattgttttatctccttgtatatgcactttattttaatataacacaatataataagaaaaataatccataatttacaattaaaaataatatgatatttttattaaaatttgtgtttttgaataaatgacattatcaaacactatatttaaataagaaatagttatcgatatttgaaaaatcgaagaatattgattgatattatagaatatgagtcggtgttatttgtatataaagtattaatatgtaattaagaaagtcgacgcttgttaacaataacaacaactatatgtataaaaaaacctcgcaactgttagttaactgaatcatttagctaacttcgttgtgaggtcattttgttttaataatatcgttataactttttcacggttaataataagtatatgaagaatggggcaccaaaagcagcaataaatacacctgctggcacttctttaggcaagaataaggtacgcccaattaagtctgcaataacaattgatatggcaccaatcattgctgacattagtaactttttagcataacttccgcgaacgattgttttcgcgatatgtggtgcgattaaaccgacaaacccaatgttacctactaaactgattgccatagatacgagtatagtagaagtgattaattggattagtttcatacgttgtacatgtaagcctaagccaatcgctacagggtcatcaagtatagatattttcatttttggtataacaagaaataacaacggcacaacagctaaaataaccatacccaaaatgattgtatctttaaacgtagcaccgtaaagacttccgactagccatgtataagctttggcagcagataattgcttcgttgtaatgagtaatccttggacaagcgcaataaacaacgtttgcatcgaaataccgatgattatgagtgttgtcgggcgtatttgtcctttcgtttgaaacactaatagtatcatcattgcaactgcgccacctaatactgcaaatagtggaagtaaatgtatcgttaaatggctgaaaaatgcaataaagacaacagcacttaagctagcaccacctgtgataccgataatatcaggtgaggcaattggattttttaatacattttgcaacattaaaccactcattcctagtgcggcacctgctaaaatcgcaagtgtaatgcgaggtaagcgtaatacttctaaagtgaattgatccatactgtcatttggatttataaagtacatcagtacgcgttgtaatggtataaagcttgaaccaatcatcatacttaccactgaaacgatggctaaaaagattaacgcgaagatgagatggtaattgtcttttttattaatcttttcggtcataagcgttgacgtcctttcttcataatatagattaagacaatagcgccaatgacagcggtaacgacaccgataggcaactctagtggcttaatgattatacgagcaacaatgtctgaaatgatcattaggattgctccagctaatgcagtaaaaggaattaaatacttatagtttggtggtaataatcgtttgctaatattcggtacgataagacccacaaagacgattgatccagctacggctaccgaaataccggctaacatactgatgagcataataatcatccatttgattaattttatgttttgaccgaggccggttgcaatgtcgtcacttgtcatcaagatgttgatgtgtgcagccatgctaaatgcaattaaaataagtatcaatacaagcggaataatccatgggatatcccaaatattacgtaatgaaacggagccacttaaccaaaataataggccttgtaagtctgtttcgttcataataagtatgccttgagtaaaggctgtaaatagcatcgcaatcgcagcacctgccaaaatgacacggtgaggtgagaatagtgtttgtctaaacatacctagcgcaacaactaatacagtaacaacaatagcccccaaaaatgcaataactacaatcattttaaaagattgaatttggataaatgtaatactaaaaatgacaaaaaatactgcgcctgcattgacaccgaaaagccctggtgaggctattgggtttcgtgtaagtgcttgcatcaacaaacctgagacagcaagggcagcaccagtcaataacgcaatgattgttctcgacgcccgtgcaccagtgacaacatcatgtaaatcgttttcactatcaaagttgaataacgcctgtatcaccgtacctggtgacacaagcgtatttccaatcattaaacttaagatagctactattgcaagacataaaccagcaataacgatttggtattttggtttaagtagcatcgtaaaactccttaattattttgattgtttttcaatatttaacttttcatataaatcgtcaataagttttaatgaagatttatatccgccagctaagttccaagtgatttcatctaaatcatcagatacttggttgtttttaactgcgtctaaatttttccactctttacttgaagtccattcgctttcagtctttttaactaatgcagcatctttcgcatttggatctgattttactacaaaaatatgatcagcgttcattaatggaatgctttctttagatgtaagttggataatatctttaccattatcaacttgtttttgtaagtctttattacgtttgaatcctaaatcatttaagatttcaccagcatatccaccagcataaattcttgtatgatcagcacggaagttaacaactgaagctttcaatggccatgcatctttatactttgcttttgcatctttttggaatgcagctactttatcatcgtactttttaagtaaatcttcagcttctttttctttccctaaagctttccccattaacttagttgtatctttgaatttgaaaactgtatcagtagaaactgttggtgcgattttagataattgatcgtaaactttttcatttctaacttttgacgcgacaattaagtccggttttaatttagagatttcctctaagttaggtgcaggttcttgacctacaatcttagtatcttttaaatcattttttatgtattcgaatttcggtttttgtgtccatgattctacagcacctacaggtttaacacctaaagatacagcgacgtcagtggcaccttgatatagcgtaacaacacgctttggtttccctttaatttcagttgtacccattgcatgtttaattgaagttgtttccttatctttgttatcagatgattgtttatttgaattcccactacatcctgctaaaacaagtaggaaagcaagcgtaacaacaagcattttaattactttattcattgactaattagcctccttcgtgatgtatgacaatgagaatcattatcacgatttagtatgaattaaattttttcctaagtcaataaaatatttatgatttacatgcaacttataattatttgacatataaatgcataaaaaatataatcctaattacttgatagtgagaatcattatcaattaggtaacacacaatattatagaattttaaatttgaggaggaagcgcttttgattgaaaaaagtcaagcatgtcacgattcattgatagattctgtagggcaaacacctatggttcaacttcatcaactatttccgaaacatgaagtgtttgcaaagttagagtatatgaatcctggaggcagcatgaaagatcgacctgccaagtacatcattgaacatggtattaaacatggtttaatcactgagaatacacatttaattgaaagtacttctggtaatttaggcattgcgttggcaatgatagctaaaatcaagggattaaaactcacgtgtgttgttgatcctaaaatatcaccaacaaatttgaaaattattaaaagttatggtgccaatgtagaaatggttgaagaacctgatgcacatgggggttatttaatgactcgtattgcaaaggtgcaagaactgttagccactattgacgatgcatattggattaatcaatatgcgaatgagttaaattggcaatcccattatcatggtgcaggcacagagattgttgaaacaattaagcaacctatagattattttgtcgcgccagtcagcacgacaggtagcattatgggtatgagtagaaaaataaaagaagtgcatccaaacgcacaaattgttgctgttgatgcgaaagggtcagtcatttttggtgacaaacctattaatagagaattacctggtatcggtgctagtcgtgtacccgaaatattgaatagatcagaaattaatcaagtgatccatgtagatgattatcaatctgctttgggctgtcgaaaactgattgattatgaaggcatatttgccggaggttcaacaggttcgattattgcagcgattgagcagttgataacgtcaattgaagaaggtgcaacaattgtcacgattttaccagatcgaggcgatcgttacttagatttagtttattcagatacatggttagaaaaaatgaaatcaagacaaggagttaaatcagaatgaatagagagatgttgtatttaaatagatcagatattgaacaagcgggaggtaatcattcacaagtttatgtggacgcattaacagaagcattaacagcccatgcgcacaatgattttgtacaaccgcttaagccgtatttaagacaggatcctgaaaatggacacatcgcagatcgaataattgcaatgccaagtcatatcggtggtgaacacgcaatttcaggtattaagtggataggtagtaagcacgacaatccatcgaaacgtaatatggagcgtgcaagtggtgtcattattttgaatgatccagaaacgaattatccaattgcagttatggaagcaagtttaattagtagtatgcgtactgcagcagtttcagtgattgcagctaagcatttggctaaaaaaggatttaaagacttaacaatcattggatgcgggctaatcggagacaagcaattacaaagtatgttagagcaattcgatcatattgaacgcgtgtttgtttacgatcaattctctgaagcatgtgcacgctttgttgatagatggcaacaacagcgtccggaaattaattttattgcgacagaaaatgctaaagaagcagtatcaaatggtgaagtagtcattacatgtaccgtaacggatcaaccatacattgaatatgattggttacaaaagggtgcatttattagcaacatttctatcatggatgtgcataaagaagtctttattaaagctgacaaagtcgtagtagacgactggtcacaatgtaatcgagaaaagaaaactattaaccaattggtgttagaaggtaaattcagcaaagaagcacttcatgctgaactagggcaacttgtgacaggtgacataccaggacgtgaagacgatgatgaaatcatattacttaatccgatgggtatggctatcgaagatatttcaagtgcttactttatttatcaacaggcacaacaacaaaatattgggacaacattgaacctatattaagaatgcgaggtgtctgaacattgcagaatcatacagcagtcaatacagcacaaacgataatattaagagatttagttgatgcattattatttgaagatatagccggtattgtatcgaatagtgagattactaaagaaaatggacaaaccattttgatatacgaacgtgaaacacaacaaataaagatacctgtttattttagtgctttaaatatgtttcgttatgaaagttcacaaccaattacgatagagggaagggcgtctaagcaacctttaacggcagctgaattttggcaaacaattgctaatatgaattgtgatttaagtcaagaatgggaagtggctcgagttgaagaaggactgactactgctgccacacagcttgctaaacaattatcagaattagatttagcgtcgcatccttttgtgatgtccgagcagtttgcaagtttaaaagatcgtccattccatccattagctaaagaaaaaagaggattaagagaagcggattatcaagtgtatcaagctgaattaaatcaatcatttcctttaatggttgcagcagttaaaaagacacatatgattcatggcgatactgcaaatatcgatgaattagaaaatttgacagcacctataaaagaacaagcgacagacatgttaaatgatcaagggttatcaatagatgactatgtactatttccggtacatccttggcaatatcagcatattttgccgaacgtctttgcgaaagagattagtgaaaagttggttgtactattaccgttaaaatttggagattatctgtcgtcttcaagtatgcgttcattaattgatattggcgcaccgtataaccatgtcaaagtaccatttgcaatgcagtcattaggcgcattaaggctaacgcctacgcgttacatgaaaaacggagaacaagcagaacaattattacgtcagcttatagaaaaagatgaagcactagctaagtatgtcatggtttgtgatgaaacagcttggtggtcatatatgggtcaagataatgatattttcaaagatcaattaggtcatctaactgttcagctaagaaaatatcccgaagtgctagccaaaaatgatacgcaacagctagtgtcaatggcagcactcgcggcaaatgatcgcactttatatcaaatgatttgtggaaaagataatatttctaaaaatgatgtcatgacgttatttgaagatatcgcgcaagtctttttaaaggtaacactatcatttatgcaatacggcgcattaccagagttgcatggtcaaaatatattgttgtcatttgaagatggacgtgtacaaaaatgcgtgttacgtgatcatgatactgtcagaatttataaaccatggctaacagcacatcagctttcattgccgaagtatgtcgtcagagaagatacacctaatacgctaattaatgaagatttggaaacattctttgcttattttcaaacattagctgtatcggtaaatctatatgccattattgatgcaattcaagatttatttggtgtaagtgagcatgaacttatgtcgttgttaaaacaaattttaaaaaatgaagtggcaactatttcatgggttacaactgatcagctagctgtcagacacattttatttgataaacagacgtggccatttaaacaaattttattaccattgctatatcaacgtgatagtggtggaggtagtatgccttcaggtttaactaccgtaccaaatccaatggtgacatatgattaatcagtctatatggcgcagtaactttcgcattttatggctcagtcagtttatagcgattgctggactgacagtacttgtgccattattgccaatttatatggcatcactacaaaatctatcagtcgtagaaatacagttgtggagtggtatagcgattgctgctccagctgtaacgacgatgatagcttcgccgatatgggggaagctaggtgataagatcagccgaaaatggatggtgttaagagcgttacttggtttggcggtatgcttatttttaatggcattgtgtacgacaccattacagtttgtacttgtgaggttattgcagggactatttggtggtgttgttgatgcatcaagtgcgtttgcgagtgcagaggcgccagctgaagatcgtggaaaggtattaggaagactgcaaagttcagtcagcgcagggtctcttgtggggccattaattggcggtgttacagcttcgatattaggttttagtgcgttactgatgagtattgccgttattacttttattgtctgtattttcggtgcattaaaattgattgaaacgacacatatgccaaaatcacaaacaccaaatattaataaaggtattcgccgttcatttcaatgtctattatgcacacaacaaacatgtcgatttattatcgttggcgttttagcaaactttgctatgtatggcatgctaactgcattatcaccacttgcttcatcagtgaatcatacagcgatagatgaccgtagtgtgattggatttttacagtccgcattttggacggcttcgatattaagcgcgcctttatggggacgctttaatgataaatcatatgttaaatcagtatatatatttgccacgattgcatgtggttgtagtgcgatactgcaaggtttagcgacgaatatagagtttttaatggctgcaagaatacttcaaggattaacatatagtgcattgattcaaagtgtcatgtttgttgttgtaaatgcttgtcatcagcaacttaaaggcacatttgttggaacgacgaacagtatgttagttgttggtcaaattattggcagtcttagtggcgctgccattactagttatactacaccaactactacgtttatcgttatgggcgtagtatttgcagtaagtagtttatttttaatttgttcaaccatcactaatcaaatcaacgatcacacattaatgaaattatgggagttgaaacaaaaaagtgcaaaataaagaattaatacaacatgcagcgtatgcggctatcgaacgcattttaaatgaatattttagagaagaaaatttatatcaagtaccacctcaaaatcatcaatggtctatacaattatcagagctcgaaactttaacgggtgaatttcgctattggtctgcgatggggcatcatatgtatcatccagaggtatggcttatcgatggaaaaagtaaaaaaataacaacttataaagaagcaattgcgcgtattttgcaacatatggctcaaagtgcagataatcaaacggcagtgcaacaacatatggcgcaaattatgtctgacatcgataatagcattcatcgcacggcgcgttatttgcaaagtaacacaatagactacgcagaggatcgctatatcgtttcagaacaatctttatacttaggtcatccatttcatccgactcctaagagtgcaagtgggttttcagaagcagatttagagaaatatgcacccgaatgtcatacatcattccaattgcattatttagctgtgcatcaaaatgttctgctcacgcgctatgtagaaggtaaagaagatcaggttgagaaagtgttgtatcaattagcagatataaacatatcagagatacccaaagattttattttattaccaatacatccttatcaaatcaatgtgttgcgacagcatccacagtatatgcaatatagtgaacaaggtttaataaaagaccttggcgtttccggtgatttagtgtacccgacgtcttcggttagaactgtattttcaaaagcattaaacatttatttaaaattaccgatacacgttaaaattactaattttatacgtacgaatgatcttgaacaaattgaacgaacaattgatgccgcgcaagttatcgcatcagtcaaagatgaggttgaaacaccccattttaaattgatgtttgaagaaggatatcgtgcattgttaccgaatccattagggcaaacagttgaacctgaaatggatttattaacaaatagtgccatgattgttcgtgaagggataccgaattaccatgctgataaagatattcatgtattggcgtcattatttgaaacgatgcctgattcaccgatctctaagttatcacaagtgattgagcaaagtggtttagcaccagaagcatggcttgaatattatttggatcgtacattattgccgatattaaagctgtttagtaacacaggcattagtctagaagcacatgtacaaaatacattaattgaattaaaagatggcatacccgatgtatgctttgtcagagatcttgaaggcatttgtctatctagaacgattgctactgaaaaacagcttgtgccaaatgttgtggcagcatcaagccctgttgtatatgcacatgatgaagcatggcatcgtcttaaatattatgttgtagtaaatcacttaggacaattagtatcaactattggtaaagcgactagaaatgaagttgtgttatggcaacttgtagcgcatcgtcttatgacttggaaaaaagaatacgcgaataacgcagtatttgttgactgtgtagaagatttatatcaaacgccgaccattgcggctaaagcgaatttgatgagtaaattgaatgattgtggtgcaaaccctatttatacacatataccaaatccaatttgtcataacaaggaggtatcgtattgtgaatcaaacaattcttaatcgtgtaaagactagagtaatgcatcaactggtatcatcacttatttatgagaatattgttgtgtataaagcgtcatatcaagacggtgtcggtcattttacaatagaaggacatgattcagagtatcgttttactgctgaaaagacacatagctttgatcgtatacgtatcacatcaccaattgagcgtgtcgtaggagatgaggcagatacaacaacagactatacacaattattgagagaggttgtatttacatttcctaaaaatgatgaaaagctagaacaatttattgttgagttattacagacagaattaaaagatacacaaagtatgcagtatcgagaatcaaacccaccagcaacacctgagacatttaacgactatgaattttatgcgatggaagggcatcagtatcatccaagttacaaatcacgtttaggatttacgttgagtgataatttgaaatttggtcctgattttgtaccaaacgttaaactgcagtggttagctatcgacaaagataaagtagaaacgacggtatcaagaaatgttgtagttaacgaaatgttacgtcaacaagttggcgataagacttatgaacattttgtacagcaaattgaagcgtctggcaaacatgtaaatgatgttgagatgatacctgtacacccatggcagtttgaacatgtcatccaagttgatttggctgaagaaaggcttaatggcacagtactatggttaggggaaagtgatgagctatatcaccctcaacaatcgattcgtacgatgtcgccaatagacacgacaaaatattatttaaaggtaccaataagtataacgaacacttcaacgaaacgagtgttggcgcctcatacaattgaaaatgcagcgcaaattacggattggttaaagcagatacagcaacaagatacgtatttaaaagatgaattaaagacagcttttctaggggaagtcttaggacagtcttatttaaatacacaactttcgccttataaacaaactcaagtttatggtgcgttaggtgttatatggcgtgaaaatatatatcatatgttaatcgatgaagaggatgcgataccatttaatgcactttatgcaagtgataaggatggtgtaccattcattgaaaagtggattaaacaatatggttctgaagcttggacaaagcaatttttagctgtagcgattcgtccaatgattcatatgctttattatcacggtattgcctttgaatcgcatgcacaaaatatgatgctcattcatgaaaatggttggcctacacgtattgccttaaaagatttccacgatggtgttcgttttaagcgtgagcatttaagtgaagcagcttcacacctgacattaaagccaatgccagaagcacataaaaaagtgaatagtaattcatttattgaaacagatgacgaacgtttagtacgcgactttttacatgatgcatttttctttattaatatcgccgaaatcatcttatttattgaaaagcaatatgatatcgatgagcagcgacaatggcaatgggttaaagacattatcgaggcgtatcaagaagcatttccagagttgaataactatcaacatttcgatttgtttgaacctacgattcaagttgaaaagttaacgacacgtcgattattaagtgactcagagttaagaattcatcatgttacaaatccattaggtgtaggaggtatcaatgatgcaacaactatctctgaaacatagattaaacaatggtgattcagtttatggcatttttaattctataccggacccattgatgatcgaggttatcgcagcaagcgggtatgactttgttgtgattgatacagaacacgtggcgattaatgatgagacactagcgcatttaattcgtgcagctgaagcagcgcatattataccaattgtacgtgtcactgcagtgatagatagagatatcattaaagtgttagatatgggtgcgagaggtattattgtgccacatgttaaagatcgtgagacagttgagcatattgtgaaattaagtcgttattacccgcaaggattaagaagtttgaatggtggtcgcatggcaagatttggacgtacaccattacttgatgcaatggagatggctaatgagcatattatggtgattgccatgatagaagatgttgaaggggttatggccattgacgatatagcacaagtcgaaggtttagacatgatagtcgaaggtgccgcagatttatcccagtcacttggcataccatggcaaacgcgtgatgatcaagtaacatcacatgttcaacatatttttgaagttgtgaatgcacatggtaaacatttttgtgcattaccacgtgaagatgaagatattgcaaaatggcaggcacaaggtgtacaaacatttattttaggtgatgatcgcggaaaaatatatcgccatttaagtgcatctctagcgacgtctaaacagaaaggggatgaaggctaatgcgtatagttcaacctgttattgaacaattaaaagcacaatctcatccagtttgtcattatatctatgatttagtcggactggaacatcatttgcaacatattacatcgtcattgccgagtaattgtcaaatgtactatgcaatgaaagcaaatagtgaacgaacaatcctagatacaattagtcagtatgttgaaggattcgaagttgcatctcaaggtgaaatagcaaaaggtcttgcttttaaaccagcaaatcatattatttttggtggccctggtaagacagacgaggaactaagatatgcagtaagtgaaggtgttcagcgtattcatgttgaaagtatgcatgaattacaacggctaaatgccatcttagaagatgaagataagacacaacacattttattgcgtgttaatttagcaggaccatttcccaatgcaacgttgcatatggcaggacgcccaacacaatttggtatttctgaagacgaagttgatgatgtcattgaagctgcgctagcaatgccaaatattcatctagatggctttcattttcattctatttctaacaatttagactcgaatttacatgtcgatgtagtgaaactttattttaaaaaagcaaaatcatggtctgaaaaacatcgatttccactcaaacatatcaatcttggtggtggtataggggttaactatgcagatttaactagccaatttgagtgggataattttgtagaaaattttaaaacacttatcgttgagcaagaaatggaagatgtgacattgaactttgaatgtgggcgctttattgtggcacatattggttactatgtgacagaagtgctagatattaagaaagtgcatggtgcttggtatgccattttaagaggaggtacgcaacaatttagactgccggtatcttggcagcataaccatccttttgaaatttatcgctataaggacaatccatattcatttgaaaaagtttcaatttcgagacaggacacaacgttagtcggtcaattatgtacaccgaaagatgtctttgctagagaagtacagatagacgcaatcagtacaggcgacgttattgttttcaaatatgcaggtgcatacggatggtctatttcacatcacgatttcttaagccatccacatcctgaatttatttatttaacgcaaacaaaggaggatgaataactattgaatcatattcatgaacatttaaaattggtaccagtagataagattgatcttcacgaaacattcgaacctttaagattggaaaagacgaaaagtagtattgaagcagatgattttatacgtcatcctattttagtgacagcgatgcaacatggtagatatatggttatagatggtgtgcatcggtatacaagtttgaaagcgttaggatgtaagaaagttccagtgcaagaaatccatgaaacacaatattcaattagtacatggcaacataaagttccatttggtgtgtggtgggaaacgttacaacaagaacatcgcttgccatggactactgagacaagacaagaagcgccatttattacaatgtgtcatggtgatacagaacaatatttgtatacaaaagatttaggcgaagcacattttcaagtatgggaaaaggttgtcgcaagttatagtggttgttgttctgtagagagaattgcacaaggtacatatccttgtctttctcaacaagatgtactcatgaagtatcagccattgagttataaggaaattgaagcggttgttcataaaggggaaactgtgccagcaggtgtgacacgctttaatatttcaggacgatgtcttaatcttcaagtaccactggcattacttaaacaagatgatgatgttgaacaactgcgcaattggaagcagtttttagcagataagtttgccaatatgagatgctatactgaaaaagtatacttggtggagcaatagttttactgtgatgttgagggaaatatgatgatttagcgtattgatagcgaaaatataataaaacaatatagtgtggagaacttttgatattttataaatattgaagttctccatttttgtattttgcatataaaaattaaataaaataaggtatattaaggtaaagtataaatattaaataaatggggaatagacatggaaaaaatgtagaaaaatcattcataaagataggtttatattttcaaatagcttatatagtactcatggctataactttatgtgggtttgtaatttgctatggactaattttcggccttttctatttattatcaggtagcagagctgattatttaatagtaacaatagttatatcggcaataatttctatatttgtaattatactttcaatcgtacctgtcatcgtattggcatctgacttatttaaagaaaggatttcaaaaggtgtcatattaattgtattggctattattgctttagtattatgcaactttgtatctgcaatactctggtttgtttcagccatatctattttaggtagaaaaaaattagtagctgcagcagatactaccactattcaaaaaagtaaagggaacgcaaatcaagcatcacataaagacacgtgtaaaaaggaacttgatagtcaagacatgatggaacatcctgaggttaaaaatcccacgactaaaaaccttgaaggatttaacgaagaaatacataaagatgaagctacaactaaagttgtcagtgataacacggaaccgccgattgaatcaaaagaccatgtctcgaaaaaagattgatgacaaactaatcgagagacttaaaaaaataatattcaacataagaacttttaaaacgacatttaaacgcattgccaatcactaatggtagtgcgtttaactataccttaaatatctgaatattttgttaaatggagctacctttgttgtactattcaaatgaagaggagtaaaatgtaattaaaggaaagaaatttgaggagtgatctttatgacaaacaacaaagtagcattagtaactggcggagcacaagggattggttttaaaattgcagaacgtttagtggaagatggtttcaaagtagcagttgttgatttcaatgaagaaggggcaaaagcagctgcacttaaattatcaagtgatggtacaaaagctattgctatcaaagcagatgtatcaaaccgtgatgatgtatttaatgcagtaagacaaactgcagctcaatttggcgatttccatgtcatggtaaacaatgccggccttggaccaacaacaccaatcgatacaattactgaagaacagtttaaaacagtatatggcgtgaacgttgcaggtgtgctatggggtattcaagccgcacatgaacaatttaaaaaattcaatcatggtggtaaaattatcaatgcaacatctcaagcaggcgttgagggtaacccaggcttgtctttatattgcagtacaaaattcgcagtgcgaggtttaacacaagtagccgcacaagatttagcgtctgaaggtattactgtgaatgcattcgcacctggtatcgttcaaacaccaatgatggaaagtatcgcagtggcaacagccgaagaagcaggtaaacctgaagcatggggctgggaacaatttacaagtcagattgctttgggcagagtttctcaaccagaagatgtttcaaatgtagtgagcttcttagccggtaaagactctgattacattactggacaaacaattattgtagatggtggtatgagattccgttaataattatccactaatgataaataaatccttattgttaagtttaatcacttagcagtaaggattttttagtgcacttagaagggagtgtattggtagaaaattaataagcgaagttcttaagtgagttatgatgtcactgtctaatgcatcagttgaaagcattattagtattaacacacccaagatattataaaacatcacaaaacgccactatctaatttatctcaataaaaattcacaaagttatctcattttatttttataaataaaaaatatcgataaaaagcttacaatactttatgtttttatgatatatttttaatgtataaatgaggtggaagatttggaaagagttttgataactggtggggcaggatttattgggtcgcatttagtagatgatttacaacaagattatgatgtttatgttctagataactatagaacaggtaaacgagaaaatattaaaagtttggctgacgatcatgtgtttgaattagatattcgtgaatatgatgcagttgaacaaatcatgaagacatatcaatttgattatgttattcatttagcagcattagttagtgttgctgagtcggttgagaaacctatcttatctcaagaaataaacgtcgtagcaacattaagattgttagaaatcattaaaaaatataatagtcatataaaacgttttatctttgcttcgtcagcagctgtttatggtgatcttcctgatttgcctaaaagtgatcaatcattaatcttaccattatcaccatatgcaatagataaatattacggcgaacggacgacattaaattattgttcgttatataacataccaacagcggttgttaaattttttaatgtatttgggccaagacaggatcctaagtcacaatattcaggtgtgatttcaaagatgttcgattcatttgagcataacaagccatttacattttttggtgacggactgcaaactagagattttgtatatgtatatgatgttgttcaatctgtacgcttaattatggaacacaaagatgcaattggacacggttataacattggtacaggcacttttactaatttattagaggtttatcgtattattggtgaattatatggaaaatcagtcgagcatgaatttaaagaagcgcgaaaaggagatattaagcattcttatgcagatatttctaacttaaaggcattaggatttgttcctaaatatacagtagaaacaggtttaaaggattactttaattttgaggtagataatattgaagaagttacagctaaagaagtggaaatgtcgtgaaaatgacattgaagctgtccataataataagggttatgcctatcaaagaaaattagacaaactagaagaagtgagaaaaagctattacccaattaaacgtgcgattgacttaattttaagcattgttttattatttttaactttaccgattatggttatattcgccattgctatcgtcatagactcaccaggaaaccctatttatagtcaggttagagttgggaagatgggtaaattaattaaaatatacaaattacgttcgatgtgtaaaaacgcagagaaaaatggtgcgcaatgggctgataaagatgatgatcgtataacaaatgtcgggaagtttattcgtaaaacacgcattgatgaattaccacaactaattaatgttgttaaaggggaaatgagttttattggaccacgcccggaacgtccggaatttgtagaattatttagttcagaagtgataggtttcgagcaaagatgtcttgttacaccagggttaacaggacttgcgcaaattcaaggtggatatgacttaacaccgcaacaaaaactgaaatatgacatgaaatatatacataaaggtagtttaatgatggaactatatatatcaattagaacattgatggttgttattacaggggaaggctcaaggtagtcttaatttacttaataagttcaaataaaagttatattttaaagattgtgaccaattgttacagtataacgaggaatcccttgagacagtatcaaatggcattaagaaatatgtgccatcattgatttgcatggctataaatactattcatctgatgagatagccatgttaagaaattgaaagtatagcattaaaggggtttgtaacagttgaaaattatatattgtattactaaagcagacaatggtggtgcacaaacacatctcattcaactcgccaaccatttttgcgtacaccatgatgtttatgtcattgtaggcaatcatggaccaatgattgaacaactagatgcaagagttaatgtaattattctcgaacatttagtaggtccaattgactttaaacaagatattttagctgtcaaagtgttagcacagttattctcgaaaattaagcctgatgttatccatttacattcttctaaagctggaacggtcggacgaattgcgaagttcatttcgaaatcgaaagacacacgtgtagtttttactgcgcatggatgggcttttacagagggtgttaaaccagctaaaaaatttctatatctagttatcgaaaaattaatgtcacgtattacagatagcattatttgtgtttcagatttcgataaacagttagcgttaaaatatcgatttaatcgattgaaattaaccacaatacataatggtattgcagatgttcccgctgttaagcaaacgctaaaaagtcaatcacataacaatattggcgaagtagttggaatgttgcctaataaacaagatttacagattaatgccccgacaaagcatcaatttgttatgattgcaagatttgcttatccaaaattgccacaaaatctaatcgcggcaatagagatattgaaattacataacagtaatcatgcgcattttacatttataggcgatggacctacattaaatgattgtcagcaacaagttgtacaagctgggttagaaaatgatgtcacatttttgggcaatgtcattaatgcgagtcatttattatcacaatacgatacgtttattttaataagtaagcatgaaggtttgccaattagcattatagaagctatggctacaggtttgcctgttatagccagtcatgttggcggtatttcagaattagtagctgataatggtatatgtatgatgaacaaccaacccgaaactattgctaaagtcctggaaaaatatttaatagacagtgattacatcaaaatgagtaatcaatctagaaaacgttatttagaatgttttactgaggagaaaatgattaaagaagtggaagacgtttataatggaaaatcaacacaatagtaaattactaacattgttacttatcggtttagcggtttttattcagcaatcttcggttattgccggtgtgaatgtttctatagctgactttatcacattactaatattagtttatttactgtttttcgctaaccatttattaaaggcaaatcattttttacagtttttcattattttgtatacatatcgtatgattattacgctttgtttgctattttttgatgatttgatatttattacggttaaggaagttcttgcatctacagttaaatatgcatttgtagtcatttatttctatttagggatgatcatctttaagttaggtaatagcaaaaaagtgatcgttacctcttatattataagcagtgtgactataggtctattttgtattatagctggtttgaacaagtcccctttactaatgaaattgttatattttgatgaaatacgttcaaaaggattaatgaatgaccctaactatttcgcgatgacacagattattacattggtacttgcttacaagtatattcataattacatattcaaggtccttgcatgtggtattttgctatggtctttaactacaacggggtctaagactgcgtttatcatattaatcgtcttagccatttatttctttattaaaaagttatttagtagaaatgcggtaagtgttgtgagtatgttagtgattatgctgatattactttgttttaccttttataatatcaactactatttattccaattaagcgaccttgatgccttaccgtcattagatcgaatggcgtctatttttgaagagggctttgcatcattaaatgatagtgggtctgagcgaagtgttgtatggataaatgccatttcagtaattaaatatacactaggttttggtgtcggattagtggattatgtacatattggctcgcaaattaatggtattttacttgttgcccataatacatatttgcagatctttgcggaatggggcattttattcggtgcattatttatcatatttatgctttatttactgtttgaattatttagatttaacatttctgggaaaaatgtaacagcaattgttgtaatgttgacgatgctgatttactttttaacagtatcatttaataactcaagatatgtcgcttttattttaggaattatcgtctttattgttcaatatgaaaagatggaaagggatcgtaatgaagagtgattcactaaaagaaaatattatttatcaagggctataccaattgattagaacgatgacaccactgattacaatacccattatttcacgtgcatttggtcccagtggtgtgggtattgtttcattttctttcaatatcgtgcaatactttttgatgattgcaagtgttggcgttcagttatattttaatagagttatcgcgaagtccgttaacgacaaacggcaattgtctcagcagttttgggatatctttgtcagtaaattatttttagcgttaacagtttttgcgatgtatatggtcgtaattactatatttatagatgattactatctaattttcctactacaaggaatctatattataggtgcagcactcgatatttcatggttttatgctggaactgaaaagtttaaaattcctagcctcagtaatattgttgcgtctggtattgtattaagtgtagttgttatctttgtcaaagatcaatcagatttatcattgtatgtatttactattgctattgtgacggtattaaaccaattacctttgtttatctacttaaaacgatacattagctttgtttcggttaattggatacacgtctggcaattgtttcgttcgtcattagcatacttattaccaaatggacagctcaacttatatactagtatttcttgcgttgttcttggtttagtaggcacataccaacaagttggtatcttttctaacgcatttaatattttaacggtcgcaatcataatgattaatacatttgatcttgtaatgattccgcgtattaccaaaatgtctacccagcaatcacatagtttaactaaaacgttagctaataatatgaatattcaattgatattaacaatacctatggtctttggtttaattgcaattatgccatcattttatttatggttctttggtgaggaattcgcatcaactgtcccattgatgaccattttagcgatacttgtattaatcattcctttaaatatgttgataagcaggcaatatttattaatagtgaataaaataagattatataatgcgtcaattactattggtgcggtaatgaatttagtattatgtcttgttttgatatatttttatggaatttacggtgcggctattgcacgtttaattacagagtttatcttacttatttggcgatttgttgatattactaaaatcaatgtgaagttgaatattgtaagtacgattcaatgtgtcattgctgccgttatgatgtttattgtgcttggtgtggtcaatcattatttgccccctacaatgtacgctacgctgctattaattgcgattggtatagtagtttatcttttattaatgatgactatgaaaaatcaatacgtatggcaaatattgaggcatcttcgacataaaacaatttaagtatcggtaacgctatactttagaaatttaagattaagaagaaaaggcaatttcttattgaaaaatggaagttgtcttttttaattctctttaaaagcgggaaacaaaagcagttaaatgcctttttgcattcaatattaaatattatatcaatttcgaatatttaaattttatataattggatataacaaataaataataattattgcaaaacacacccgaaattaattattataaaagtatattcataaaaggaggaatatacttatggcatttaaattaccaaatttaccatatgcatatgatgcattggaaccatatatagatcaaagaacaatggagtttcatcacgacaaacatcacaatacgtacgtgacgaaattaaacgcaacagttgaaggaacagagttagagcatcaatcattagcggatatgattgctaacttagacaaggtaccggaagcgatgaggatgtcagtccgtaataatggcggtggtcattttaaccattcattattctgggaaatactatcacctaattctgaagaaaaaggtggtgtaatagatgacatcaaagcgcagtggggcactttagatgaatttaaaaatgaatttgcaaataaagcaacaacattatttggatcaggttggacttggttagttgttaatgatggcaaattagaaattgtgacaacgccaaaccaagataatccattaacagaaggcaaaacaccaatcttactatttgatgtttgggagcatgcctactatctgaaatatcaaaataaacgtccagactatatgactgcattttggaatattgttaactggaaaaaagttgatgaattataccaagcagcaaaataatataacttaatataattgaggtggagcatctacaaggtgttccacttttttgtacttaatatctttacttatttgtttttgtgtaatgggatagcacgtaaaagtggcaaaataataagataaatttcaaactcgaaataccttattattgttgactaaaacgatgacttaaatgttatatacattagacaacactattaattaatcaagatattgtcattaaataaattgacaaaataagtaattattgtgaatctaaagtgaaatttttataaaaaattgtaatgattcaaaaattttgttgcatttcttttgtaatcatatgataatgtaaatgtaatcaaattgtaatataaggggaaaagacaatgaaaaaattagcaacagtaggttctttaattgtaacaagcactttagtattctcaagtatgccttttcaaaatgcgcatgccgacacaacttcaatgaatgtgtcgaataaacaaagccaaaatgtacaaaatcatcgtccttatggcggagtagtaccacaaggaatgacgcaagcacaatatactgaattagagaaagctttaccccaattaagcgctggcagtaatatgaaagactataatatgaaattgtatgatgcgacgcaaaatattgctgataaatacaatgtgataattacaactaatgtaggggtatttaaaccacatgctgttagagatatgaatggccatgcgttacctttaacaaaagatggcaatttttatcaaacgaatgtagatgcaaatggtattaatcatggtggtagtgaaatggtgcaaaataaaacaggtcatatgagtcaacaaggccatatgaatcagaacacacacatgaaccaacagccacacatgcaacaaggtcatatgcaatcatcaaaccatcaaatgatgagtccaaaagcaaatatgcaatcatcaaatcatcaaatgaaccaaagtaacaaaaaagttttaccagctgctggtgaaagtatgacatcaagtatacttactgcaagtattgccgcactactattagtatctggtttattcttagcatttagacgacgttcaacaaattaataaacataatacgattaataatagaaaaatcgtgtgattatctgagcgagcctaggacataaataaatgtcctaggctcgctaatgttatattggcagtagttgactgaatgaaattgcgcttgtaacaagcttttccatttcttacccactccctaaatagtcatcaaaaaatttcttatattttaataattttaataatccgattgtcttatacgtgtcagtgttaattcagatatttcctgtggaatataccacttattaatcataattggataaggtgtttgtgcgtacaatgtttcaataatcagccaacaatgtgtatcaccatcaaacacgtgactatgatttttgaagtggggtgctttggtaatagacatttttaaatctgattgatatgcattgttataaatcgtttgctcaacgaacgtcttcatgtcgtcttcgttttgtgtattcactttaaatgtgtcaatgacatttaacggtataaaggtaaaacaaaatgcatcagcttgcttagaatgattgtcctttttttgataatagcgttccattgcaatgacggcagaaggatggtttgcaaacaaatgatttgtatattcactttctaaatcaacacgataattaattgatgacatagatacgcgagctagcaatatttgatcaagtggatgcttaaattgatccatacttgaagcgtgttgggcatttgtttgtggaataacaaagtgtcctttccctcttgtactctctacgatgccatcttcggctaacaattttatagcttggcgcaaagtcatacgactgacatcaaagcgcgcacaaagttccttttcagtaggtaatgcatggccactcggatattttcctatttgaatttctttatataacgtattataaatcgttaaaaattttggttgtgtttgcgtcacgtagacaacctccataaagttacttaatcactctcatcatacaataatttttactcgaattggaaaaattataaaaattaaacatagataggttttgaaaattagttttatacaaggttagaagctataactgtaaaatgttcttaatattgtcaaaatgtaatgcttgaaagcgcttttaaaaaatattattatatacatggttagacaaatagacaaatcactatacaaatattgggaggaatattttatgaaatcaacaccacacattaaaccaatgaatgacgtcgaaattgcagaaacggttctattgccaggagatccgttaagagctaagttcattgcagaaacttatttggatgatgtggaacagttcaatacagtgcgaaacatgtttggttttaccggaacatataaaggtaaaaaagtttctgtcatgggttcaggtatgggtatgccatctattggcatttactcttatgaattaattcatacatttggttgtaaaaaattaattcgcgttggctcttgtggcgcgatgcaagaaaacattgatttatatgatgtgattattgcacaaggtgcctctactgattcaaattacgttcaacaatatcaattaccaggtcattttgcgccaattgcttcttatcaattattagaaaaagcagttgaaacagcacgtgacaaaggtgtacgtcatcatgtaggtaatgtgttatcaagtgatattttctataacgcggatacaacagcgagtgaacgttggatgcgtatgggtattttaggtgtagaaatggaatcagctgcattatacatgaatgcaatttacgctggtgtcgaagcattaggtgtgttcacagtgagcgatcatttaattcatgaaacgtcaacaacacctgaggaaagggaacgtgcatttacagatatgattgaaattgcactgtcattggtgtagatgattatgaatgttgaatattctaaaataaagaaagcagtacctattttattattcttatttgtattcagtttggttatagacaactcatttaaattgatttctgtagccattgctgatgacttaaacatatctgtaacgacagtaagttggcaagcgacattagccggtttagtaattggtattggcgctgtagtatacgcttcattatctgatgccattagtatacgcacactatttatttatggcgtgatattaatcattatcggatcaattattggttacattttccaacatcaattcccattacttttagttggacgtattattcaaactgccggtttagctgctgcagagacattatatgtgatatatgttgcaaagtatctttctaaagaggaccagaagacttaccttggcttaagtacgagcagttattccttgtcattagttatcggtacattatcaggtggatttatttctacgtatttacactggacaaatatgtttttaattgcattaatcgtagtatttacgttgccattcctatttaaattattaccaaaagaaaataatacgaataaagctcatttagattttgttggcttaattctagtggcaactattgctacaacagtcatgctgtttattacgaactttaattggttatatatgattggtgccttaattgcgattatcgtttttgcgctatatattaaaaatgcgcaacgtccattagtaaataaatcatttttccaaaataaacgttatgcttcatttttatttatagtatttgtaatgtatgctatccaattgggttatatttttacgttcccattcataatggagcaaatttatcatctgcaactagacacaacatcactgttattagtaccgggttatatagtagcagtcattgttggtgcactaagtggtaaaatcggcgaatatctgaattcaaaacaagcgattatcacagcaattattttaatagcactgagcttgattttacctgcatttgcagtaggtaatcacatttcaatcttcgtcatttctatgatattctttgcaggtagctttgctttaatgtatgcacctttacttaacgaagccattaaaacaatagatcttaatatgacaggtgtggctattggtttttataatttaattattaatgtggcggtatctgtaggtattgcgattgctgcggctctaatcgattttaaagcattaaatttcccaggcaatgatgcattaagttcacatttcggtattattttaattattttaggtttaatgagtattgtcggattagttttattcgtcagcttaaatcgttggacacaatctgaaaaataaatagatataaattcgcgagatatattcgtatttatagtaaaattaaataaagagattatataacacgaggagtagtaagtatgaaatttgagaaatatatagatcacactttattgaagcctgagtcaacacgtacgcaaatcgatcaaatcatcgatgaagcgaaagcatacaattttaaatctgtatgtgtgaatccaacacatgttaaatatgcagcagagcgactagctgattcagaggtgctcgtttgtacggtaataggattcccattaggtgcgtcgacaactgcaacgaaagcatttgaaacagaagatgcaattcaaaatggtgcagatgaaattgacatggtcatcaacatcggcgcattaaaagatggacgttttgatgatgtacaacaagacattgaagcagtggttaaagctgcgaaaggtcacacagtaaaagtgattattgagacggtattgttggaccatgacgaaattgtaaaagcgagtgaattaacaaaagcggctggtgcggacttcgttaaaacttcaacaggttttgcaggtggcggtgcgactgcagaagacgttaaattaatgaaagatacagtaggtgctgatgtagaagtaaaagcatcaggtggcgtacgtaatttagaagatttcaataaaatggttgaagcaggtgcgacacgtattggtgcgagcgcaggtgttcaaattatgcaaggtttagaagcagattcagattactaatatatataaattttgggagtgatagctatgacaagaccatttaatcgtgtacatttaatcgtaatggattcagtaggtattggtgaagcgccagacgcagctgattttaaagatgaaggttcacatactttaagacataccttagaaggtttcgatcaaactttaccaaaccttgaaaagttaggtctagggaacatcgataaattaccagtagtaaatgcagttgaacaaccagaagcatactatactaaattgagtgaagcttcagttggtaaagatacaatgactggtcactgggaaattatgggattaaatattatgcaaccttttaaagtataccctaatggattccctgaagagttaattcaacaaattgaagaaatgacaggtcgtaaagttgttgctaacaaaccggcatcgggtacgcaaattatcgatgagtggggcgagcaccaaatgaaaactggtgacttaattgtttatacaagtgcagacccagtattgcaaattgctgcacatgaagacattatcccattagaagagttatatgatatttgtgaaaaggttcgtgagttgacaaaagaccctaaatatttaattggtcgtattatcgcacgtccatatgttggtgaaccaggaaactttacacgtacatctaatcgacatgactatgcgttaaaaccttttggtaaaactgtcttagatcatttgaaagacggtggttatgatgttattgccatcggtaaaattaatgacatttatgatggtgaaggtgtaacagaagcggttcgtacgaagagtaacatggacggtatggatcaattgatgaaaattgttaagaaagatttcacaggtattagcttcttaaacttagtagactttgatgcattatacggtcatcgtcgtgataaaccaggttatgcacaagcaattaaagatttcgatgatcgcttgccagaactgtttagcaacttaaaagaagacgatttagtaattattacagcagaccatggtaatgacccgacagcgccaggtacggaccatacgagagaatatatcccagtaattatgtacagtccgaaatttaaaggtggtcatgcactagaaagtgatactacattcagttctatcggtgcaactatagcagataatttcaacgtaacattaccagagttcggtaaaagttatttaaaggaattgaaatagaataaatttagatattataaaaacagcagtgaagttaactataacaatagttttcttcactgctgtttttattataatagagaaacgtaagacggtaggacctcttatttaggagtatcctgatttaatgttaaacaatacgttttcggattgaaccggaaattaaatcgacaattgcgaccattagtactaaaccgattaatataatacctacacggtcccaagaacgtgtttgaatggcaaatatgagtggtgtcccgataccaccagccccaattagccccagtatagaagctgaacgtaagtttagttcaaagcgataaagtatgagtgatagaaaggcaggcataatttgtggtatgactgcaaatacgagtgttttaattttattcgcaccactggcctttaatgattctacagcactgaaatctagaccttcaatatcttcagctaaaagtttcccaagcatacctacggaatggatacctaaagctaatacacctgaaaatgaacctgggccaacagctttgataaatataagtgccattacaatttctgggaagacacgtataacacttaaaataaatttgctaacacctgaaaccgggcgtaactttaccatattatttgcacctaaaaatgctaatggaatacagataattgcggcgatgaaagtacctacaacggctatcgcaaaggtttcaagtaaaccacgtaataagtcttcgccatctggtatatagatatagctgatgtcaggatggaataatccgctgaatatggattttaagatttctaatgatttacttttaagttctaaacttggtacacctgcaaatgcccagatgataatagctaagacgacaattgcaataagccatcttttaatcaattttcgtttgtgtgcttttgtgtgaacattatattttgctatttcctgtgtcatgcgagatgtgccctcactttcgtactgatgtaatcaatgacgacgacgataactaaagtaaataaaataatcgttgctgtttttggatattgaaataaaccaagtgtttgatcataaaacaatccaataccgccagcgccgactaatccaagcacagctgaagctcgtatatttacttcaaatgcatataatacgtatgacataaatgacgatatggcttgtggtacaacaccgaaaacaatccattttattttattagcgccaacagccgtcattgcttccattggacctggatctatcgtttccaatgattcatataataattttccaataatacagatagttaaaataaacaatgctaatatccctggaatttgaccgattccaaatacagccacaaagattgctgctaataacaaatctggaatagtacgaactatatttaaaataaagcgcgagggtattgaaatccacttttgatgaacgatattgctagcacataataacgcaattggtattgaaacgatgctacctaatactgtacttacgatagccattcgaatggtatctaacattggcgttgtaatttgttgtaaatactcgaaatcaggtggaatcatttgtttgaatagatcacctatttgaggtattcctatcattaaatctccaaaattaaaccccgtataaatgaagctccaaatgataagcacaatgattaacatgaaggtaaaactcgtttttaaagaaacctttttctttaaaagggagtcatactttgtaggtatttctaaaggcatgttagttcactcctagcttttcatcttctttaattgtacgtccatatatttcactaaatacgtcatctgttgcttcagatgcaggaccatcatagacaacttcaccatcacgtaaaccaatgatgcgtgtaccatattcttttgccaagtcaacaaaatgtaaattaattaaaattgtgatgcctaattcttggttgatttttcttaaatcatccataacctgtttcgttgttaatgggtctaatgaagcaactggttcatctgcaagaataatttcggattcttggcatagcgcacgtgcaatagatatacgttgttgttggccacctgataattcatcagagcgttgattatatttatctaagatattgacgcgttctagtgcatccattgctttaattttgtcttcttttgggaataaacctaataccattttccaagtagggtgataacctacacgtccacttagtacatttcgtaatacacttgaccgtttaactaaattaaaatgttggaaaatcatacctatatttcggcgcatttctaataatgctttaccatgggctttagtgatggatttaccttggatgaaaatttcacctgacgtgatatcatgcaaacgatttacagatcttaataacgtggatttcccagcaccagatagtccgacaataactgcaaattcacctttttcaatatttaagttaatatttttcaagcctacatgaccgttaggatagactttactgacgtttttaaattcgatttgactcatgtttgacacctttctttaataaagaaaagccaaggtaaactgaaatatcatagacattgggtttctgtgtacaaatggtttcaaatgtacagcggcacctttctatatctgtttcagtttagcgcctagcttttcaatattaatctagaatatatctattgaacgaaagcttttaataccaaattcgctaatgattatttcatatctttaactaatttttcgtactctcttacaatgtcgaaatttgaatctttcgtttctgtgtatccttcatgtgaataaacttcgctaataattttgtgaccttcttttgatttagcaatgtctataaaagcttttttcaatttttcttggaaatctttatccatatctggtcttacagaaattgtgtcattcggaatagcttgtgttaattttaaaattcgtgtgtctttaaatacatttggttggtcttttttcacagtattacgtgcatcgttaaatacagccgcagcatctacatctccatttaataatgagataactgcttggtcatgacctttaacattcacaattttcatatctttagttgcattaatacctgcttcgttttttaacatcgcaagtgggaatgtatatccagcagttgatgttacatcttgtaaggcaattttcttaccttttaaatctttcaagcttttaatttttgagtcttttttaacaagaatttctgatttatagctatctacaagttctttacttgctgaaccatcttcttttacaccgaaacgttgtgcttgtaataataaatcagctgctttttgatcatgtgctaatgtgtatgccgttggtggtaagaaaccaacatcaacttttttagacttcatagcttcaacaattgtattgtagttagttgatacagacactttaactggaatccctaattctttagatagtaatttttctaatggttttgctttagcttctaatgttccagcattttgcgaaggtacaaattgaacggttaattctttaggtttgtatcctcctgatttagaatccgaatcattactagcgttcttttgattatctaaagaacttgaatttccacatgctgctgcaaaaacaatgactgctaacattaatacaaataaacacttaaaatttttcatttgataactgtccccttcacattcttaatcgtgtaatatgtatgcaatgaaattacacttatagcgtaccacatttaaatgtgaaaaagtattttataaaaatgaattttaataactttctttaagagtttgataagattttgtaaacttttcgttaaattgctcatatgcaacgaatttttatcctataattcaagaacaaatttattttaaaaggagcctcataaaatgaaaaaaatatataagtcattaactgtctctgcaattgttgcaacggtatcattaagtgctttaccgcaatctttagctataacgcatgaatcgcaacctacaaagcaacagcgaacggtattattcgatcgttctcatggtcaaacagctggtgctgcagattgggttagtgatggtgcattttcagattatgcggattcaatacaaaaacaaggttatgacgttaaagctattgatggtcattcgaacataacagaagcaagtttgaaaagttccaaaatatttgtaattcctgaggctaacattcctttcaaagaatcagaacaggcagcaattgttaactatgtgaaacaaggtggcaatgttgtctttatttcagatcattacaatgctgaccgaaatttaaatcgtattgattcatcggaggcaatgaatggttatcgacgtggagcatatgaagatatgtcgaaaggtatgaatgcagaagaaaaaagttctactgcaatgcaaggtgtgaaaagttcagattggttatctacaaactttggcgtacgttttcgatataatgcactaggtgatttaaatacgagcaatattgtttcttcaaaagaaagtttcggtattactgaaggtgtgaaatctgtctctatgcatgccggatcgacattagcaattactaatccagagaaagcaaaaggtattgtgtatacaccagaacaattgccagcgaaaagtaaatggtcacatgctgtagatcaaggtatttataatgggggcggtaaagcagaaggcccctatgtagcaatttctaaagttggaaaaggtaaagcagcatttatcggtgattcatcacttgtggaagatagttcgcccaaatatgtaagagaagataatggagaaaagaagaaaacatatgatggttttaaagaacaagacaacggtaagctattaaataatataacggcttggatgtctaaagataatgatgggaaatcacttaaggcgagtggcctaacattagatacaaagactaagttgcttgattttgaacgaccagagcgttcaactgagcctgaaaaagagccatggtcacaaccgccgagtggttataaatggtatgatccaacaacatttaaagcaggtagttatggcagcgaaaaaggcgcagatcctcagccaaacacaccagatgatcatacgccaccaaatcagaacgaaaaagtaacatttgatatcccgcaaaatgtttctgtaaatgagccatttgaaatgacaatacatttaaaaggatttgaagcaaatcaaacacttgaaaatcttagagttggtatttacaaagaaggcggacgtcaaatcggacaattttcaagtaaagataacgattataacccaccaggttacagtactttgccaacagttaaagcagatgaaaacggaaatgtcacaattaaggtcaatgctaaagtacttgaaagtatggaaggttcaaagattcgtttaaaactcggtgacaaaaccttgattacaacagacttcaaataaatatataatagaaataagaaagatgtttgtgattgaaggagtgagtgaggatgtcaaacatagcattttatgtcgtgagtgacgtacatggttatattttcccaacagattttacgagtagaaatcaatatcaacctatgggattgttactagcgaatcatgttatagaacaagacagaaggcagtatgaccaaagttttaaaatagataatggtgattttttgcaagggtcaccattttgtaattacttaatcgcgcatagcggcagtagccagcctttagttgatttttataatcgaatggcattcgactttggtacgcttggtaatcatgaatttaattatggattgccatacttaaaagacactttacgcagactcaattatccagttttgtgcgctaatatatatgaaaatgatagtacattgactgataacggtgtgaagtattttcaggttggagatcaaacggttggtgtgataggtttaacgacacaatttattccccattgggaacaaccagagcatattcagtcacttacgtttcatagtgcttttgaaatacttcaacaatacttacctgaaatgaagcgacatgcagatatcattgtggtttgttaccatggtggatttgaaaaggatttagaaagtggtacgccgaccgaagtattaacgggtgaaaatgaaggatatgccatgttagaagcgttttctaaagatatagatatctttattacgggtcaccaacatcgacaaattgctgaaaggtttaagcaaacggctgtgattcaacctggtacgagaggtacaactgtaggcagagtagtcttgagtactgatgaatatgaaaatttatccgttgaatcatgtgaattacttcctgttatagatgattccacatttactattgatgaagatgaccaacatttacgaaagcagttagaggactggttagattacgaaattactacattgccatatgatatgacgattaatcatgcatttgaggcacgtgtggcaccgcatccttttacaaattttatgaattacgctttattagaaaaaagtggagcagatgttgcctgtacagctttgtttgattctgctagtggtttcaagcaagtcgtgacgatgcgagatgttattaacaattacccatttccaaatacatttaaagttttagctgtaagtggtgccaaacttaaagaagccattgaacgatcagcagaatattttgacgtgaaaaatgatgaagtaagtgtgagcgcagacttccttgaacccaaaccacaacactttaattatgatatatatggtggcgtaagttataccattcatgttggaagaccaaagggacaacgtgtgagcaatatgatgatacaaggtcacgcagttgatttaaaacagacatatacaatttgtgtaaataattatcgtgcagttggcggtggtcagtatgatatgtatatcgacgcgccagttgtaaaagatattcaagttgaaggcgcacaactacttattgattttttatcaaataataaattgatgcgcatcccgcaagttgttgattttaaagttgaaaagtgacggatatatgtaaaacttacttgattttaatcgggtaagtttttgtttaaagcgagaaagtattatctttagacgacgtgattgaaatgtcacgtcctgtcaaaatgaatagtttattaaagttgtattttgatagaaatttactgacaccacaaaaattattgaattatttaaaagttgatgaaacatttttgaatcatctagcaggtattaatttaaaactctttaaggattatgttaatgaaaatagagaatataatataacgaatctatataaataaggcaccaatatttaaacctcgagctgaaaagatcatcatttcagttcgaggttttttattttatcctctttgtatgggtattcttttacttgaaatttgttttcctgtttttttattgtaaatttttattacatagtatcctaagttatatcctgacatttgttctccagtatttttagttttttagtaggaacataatggtatttttttgctgttagtggaacatattttttagggttttgaatttcgtttcatccatttgtaaaactggatactctaatatccggtaatagccggttaaatcgacataggatgtcactagctattccaaaattgtcttttgacgctataacgattgttgggaatcttagcatgtctaacgcagagagactttcacattttatgagtactaatcctgaaattcggctttgggatattttacaaacaaactttaaagctaaagctcttaaagaaaaagtttatattgaatatgacaaaataaaagcaactctttggaatagacgtagtatgcgcgttgaatttaatcctaataagctttcgcatgatgaagtgctttggttaaaacaaaatatcatcagttatttggacgatgttagttttacgagattagatttggcttttgattttgaatttgatttaaatgactattatgcattgtcagataagtcggcaaagaaaactatattttatggacgtaatgtaaaaccagaaacaaaatattttggtgtgcgtaatagtgataggtttattcggatttataataaaaacaagaacgtaaagataatgcagatgttgaaattgattcaacatttctatggcgtgtggaaattgaattaaaacgagatatggttgattgttggaaagattgttttgatgatttgcatattttaaaaccgaatttaaaaatgattgaaaatatacaagaacgagcaatgcttcatttattaactcacgaagaagaggaatggggaaatttagaaagacgtactaaaaataaatatagagataagttgaaaaatatagcgtctattgatttgacagatttaatgaaaatatctttaagaggaaatgaaaaccaattgcaaaaacaaatcgacttttggttgaattaattattataactaaagaactatgttcaatttatgtgcaatcatgcttttttgtccccacgttttgaacatgtttggcaccgccaaaccactcattttttgcaaaattttgcaaaaaaatggggacatgttcacttatgctcatctacttaaaataagtatttttttgttggtttttaaaagtagttgaaatgtttataataatattgaaagatatttctgttttccttttgaataataaacttaaaagagaatataaaataatgcttattaaaattaggggtggaaatatgaaaagagatttttttgaaaagtggtcgtttattttaaatttaattttattttgtgcttttttgtttttagtggttctgatgttttataaggatgtcgatttgatttatattttttgtacattattaatatcattattacctttgctaaatattataaaaagatataagaaaaagacggataattaatccgtctttttttatgaaaagaataggctgggaaataaatcaatcttctatgatctacgaagttatattggcagtaggtgactgaacgaaaatgcgcttgtaataagctttttcaattctagtcaggggccccaacacagagaattcgaaaagaaattctacagacaatgcaagttggggtgggacggcgaaataaattttgcgaaaatatcaattctgtcccactccccagaaaaggttctaccattgtcaaaaaaatgcatctctacatgttagagtaaatattggtcagccaaccaaaataatcaacacgaggagatgctatttaatgtcatctgacacaaacagtttagcacatacaaaatggaagtgtaagtaacatattgtctttgcacctaaatacagaagacaagtgatatatggaaaaataaaaaaagatatagggattatattacgtcaattatatgaaagaaaaggtgtagagataattgaagcagaggtatgtaaagatcatatccatatgttagtaagtataccacccaaacttggggtatcatcatttgttggctatttaaaaggaaaagtaatttaatgatatttgatagacatgctaacttaaagtatagatatggaaatagaaagttttggtgtaaaggattttatgtggatacagtaggtggaaataaaaaagtgattgaaaattatattcgtaatcaattacaagaggatatcgttgcagacgaaatctcaatggaagaatatttagatcctttcactggagagaaaaataaaaaaagaaagaaaaaagagtaaacctttagggttgctggaatattagtgcagttggctgacttgtcagtgcccttttagggctggccagtaaggaaggcttatagccgcagaacaaaccacccgttcacacgggtggtttttatttgtaacatctgttgataggtagcgacaaggaccttttaatgttgtgttttgtgcgatataacaagctttttaggctattaaagaatattcagaattaaatatataattatgaataaattatgtcattgaaaaaattatgattataaaatcattctaaaaacaccgaaataacaatgatttcatgaaaacatttattttaaaatttgatatttgttcaaataatattcgaaattaaacttttttgtatagaattttctttatatcctgagagacatgtactataatgtttgtgaaataattcacaaagtataaaggagtggttgtatatgttaactatacctgaaaaagaaaatcgtggatcgaaagaacaagaagtggcaattatgattgatgctctagctgacaaagggaaaaaagcattagaagcattatctaaaaagtcacaagaagaaattgatcatattgttcatcaaatgagcttagcagctgttgatcaacatatggtgctagcaaaattagcacatgaagaaactggaagaggtatatacgaagataaagcgattaaaaatttatacgcttctgaatatatatggaattcaataaaagacaataagacagtagggattattggtgaagataaagaaaaaggattaacgtatgtagcggaaccaattggtgttatttgtggtgttacgccaacaacaaatcctacgtcgacaactatttttaaagcgatgattgcaattaagacaggaaatccaatcatttttgcattccatccaagtgcacaagaatcgtcgaagcgtgcagcagaagttgtattagaagcggcaatgaaggcaggtgcacctaaagatattattcagtggattgaagtgccttctatcgaagcaacaaaacaattaatgaatcacaaaggtattgcattagttctagcaacaggtggttcgggcatggttaagtctgcatattcaactggcaaaccggcattaggtgtgggaccaggtaacgtgccgtcttacattgaaaaaacagcacacattaaacgtgcagtaaatgatatcattggttcaaaaacatttgataatggtatgatttgtgcttctgaacaagttgtagtcattgataaagaaatttataaagacgttactaatgaatttaaagcacatcaagcatattttgttaaaaaagatgaattacaacgcttagaaaatgcaattatgaatgaacaaaaaacaggtattaagcctgatattgtcggtaaatctgcagttgaaatagctgaattagcaggtatacctgtccccgaaaatacaaaacttatcatagccgaaattagcggtgtaggttcagactatccgttatctcgtgaaaaattatctccagtattagccttagtaaaagcccaatctacaaaacaagcatttcaaatttgtgaagacacactacattttggtggattaggacacacagccgttatccatacagaagatgaaacattacaaaaagattttggactaagaatgaaagcttgtcgtgtacttgtaaatacaccatcagcggttggaggtattggtgatatgtataacgaattgattccgtctttaacattaggttgtggttcctacggtagaaactcaatttcacataatgttagtgcgacagatttattaaacattaaaacgattgctaaacgacgtaataatactcaaattttcaaggtgcctgctcaaatttattttgaagaaaatgcaatcatgagtctaacaacaatggacaagattgaaaaagtgatgattgtctgtgaccctggtatggtagaattcggttatacaaaaacagttgagaatgtattaagacaaagaacggaacagcctcaaattaaaatatttagcgaagtcgaaccgaacccatcaactaatacagtatataaaggtctggaaatgatggttgatttccaaccggatacaatcattgcacttggtggtggttcagcgatggatgctgcaaaagcaatgtggatgttctttgaacaccctgagacatcattcttcggtgctaaacaaaagttcctagacatcggtaaacgtacttataaaataggcatgcctgaaaatgcgacgttcatttgtatccctacgacatcaggtacaggttcagaagtaacaccatttgcagttatcacagatagtgaaacaaatgtaaaatatccgttggctgattttgctttaacacctgacgttgcaattattgaccctcaatttgtgatgagtgtgccaaaaagcgttacagcagatacaggaatggatgtactaacgcatgcaatggaatcatatgtatctgtaatggcttcagactatacaagaggtttgagtctacaagcgattaaattgacgttcgaatatttaaaatcatctgttgaaaagggtgataaagtttcaagagagaaaatgcataacgcatcaactttggctggtatggcatttgcaaatgcattcttaggtattgcacactcaattgcacataaaattggtggcgaatatggtattccgcatggtagagcgaatgcgatattactaccgcatattatccgttataatgccaaagacccgcaaaaacatgcattattccctaaatatgagttcttcagagcagatacagattatgcagatattgccaaattcttaggattaaaaggtaatacgacagaagcactcgtagaatcattagctaaagctgtctacgaattaggtcaatcagtcggaattgaaatgaatttgaaatcacaaggtgtgtctgaagaagaattaaatgagtcaattgatagaatggcagagctcgcatttgaagatcaatgtacaactgctaatcctaaagaagcactaatcagtgaaatcaaagatatcattcaaacatcatatgattataagcaataatctatctgataataatcatataactcacctgaaattacaaaagtaaaaaatgccacataaactttaagtcgataatcattatacggttatcggcttttatttattgccaaatcttcagagagatacaaactagacaatcatttttttaaataaagaaaatattaagattgatactcatttcacaaactattactactttagagtataattatttttaatttcatataaataaaaaggcgaaaataatgcggtttaaaagtaattaattgtttaaacgatatgtaatatgtaaatactatatatataataccaattttaatgaaaatttttaagggaggtaaataatggaaagtacattagaattaacaaaaattaaagaagtattacaaaaaaacttgaagattttaattattttaccgctattatttttaattattagcgctattgttacatttttcgtcttatcacctaaatatcaagctaatactcaaatcttagtgaatcaaactaagggtgacaatcctcagtttatggcacaagaggttcaaagtaatattcaacttgtaaatacgtataaagaaattgttaaaagtcctagaattttagatgaggtgtcaaaggacttaaatgataagtattcaccatctaaattgtcgagtatgttgacaattacaaaccaagaaaatacgcaacttatcaacatccaagttaaaagtggtcataaacaagattcggaaaaaattgcgaatagcttcgctaaagttacaagtaaacaaattccgaagattatgagtgtggataacgtatcaattttatctaaagcagacggtacagcagttaaagtcgcaccaaaaactgtagtgaatctaatcggtgcattctttttaggattagttgtcgcgcttatatatatcttcttcaaagtaattttcgataagcgaattaaagatgaagaagatgtagagaaagaattaggattgcctgtattgggttcaattcaaaaatttaattaaggatggttgctacttatgtcaaaaaaggaaaatacgacaacaacactatttgtatatgaaaaaccaaaatcaacaattagtgaaaagtttcgaggtatacgttcaaacatcatgttttcaaaagcaaatggtgaagtaaagcgcttattggttacttctgaaaagcctggtgcaggtaaaagtacagttgtatcgaatgtagcgattacttatgcacaagcaggctataagacattagttattgatggcgatatgcgtaagccaacacaaaactatatttttaatgagcaaaataataatggactatcaagcttaatcattggtcgaacgactatgtcagaagcaattacgtcgacagaaattgaaaatttagatttgctaacagctggccctgtacctccaaatccatctgagttaattgggtctgaaaggttcaaagaattagttgatctgtttaataaacgttacgacattattattgtcgatacaccgccagttaatactgtgactgatgcacaactatatgcgcgtgctattaaagatagtctgttagtaattgatagtgaaaaaaatgataaaaatgaagttaaaaaagcaaaagcacttatggaaaaagcaggcagtaacattctaggtgtcattttgaacaagacaaaggtcgataaatcttctagttattaccactattatggagatgaataagtatgattgatattcataaccatatattgcctaatatcgatgacggtccgacaaatgaaacagagatgctggatcttttaaaacaagcgacaacacaaggtgttacagaaatcattgtaacatcacatcacttacatcctcgatataccacacctatagaaaaagtgaaatcatgtttaaaccatattgaaagcttagaggaagtacaagcactaaatctaaagttttattatggtcaggaaataagaattaccgatcaaattcttaatgatattgatcgaaaagttattaccggtattaatgattcacgctatttactaatagaatttccatcaaatgaagttccacactatactgatcaattatttttcgaattacagagtaaaggctttgtaccgattattgcacatccagagcggaataaagcaataagtcaaaaccttgacatactatacgatttaattaacaaaggtgctttaagtcaagtgacaacggcgtcattagcgggtatttccggtaaaaaaattagaaaattagcaattcaaatgattgaaaacaatctgacacatttcatcggttcagatgcgcataacacagaaatcagaccgttcttaatgaaagacttatttaatgataagaaattacgtgattattatgaagatatgaacggatttattagtaatgcgaagttagttgttgatgataaaaaaattcctaaacgaatgccacaacaagattataaacagaaaagatggtttgggttataaacagcaaatgaggggttttatggcacatttatctgtgaaattgcggcttttaatactagcattaatcgattcactgatagtgacattttcagtattcgtaagttattacattttagaaccgtatttcaaaacatattctgtcaaattattaatattggcagctatatcactattcatatcgcatcatatttcagcatttatttttaatatgtatcatcgagcgtgggaatatgccagtgtgagtgaattgattttaattgttaaagctgtgacgacatctatcgttattacgatggtggtcgtgacaattgttacaggcaatagaccgttttttagattgtatttaattacttggatgatgcacttgattttaataggtggctcaaggttattttggcgtatttatcggaaataccttggaggtaagtcatttaataagaagccaactttagttgttggtgctggtcaagcaggttcaatgctgattagacaaatgttgaaaagtgacgaaatgaaacttgaaccggtattagcagtcgatgatgacgaacataaacgcaatatcacaattactgagggtgtaaaagtccaaggtaaaattgcagatattccagaactagtgaggaaatataagattaaaaaaatcatcattgcaattccaactattggtcaagagcgtttgaaagaaattaataatatttgccatatggatggcgttgagttattgaaaatgccaaatatagaagacgtcatgtctggtgagttagaagtgaaccaacttaaaaaagttgaagtagaagatttactaggcagagatcctgttgaattagatatggatatgatatcaaatgaattgacgaataaaactattttagttacgggtgcaggtggttcaataggatcagaaatttgtagacaagtttgtaatttctatccagaacgtattattctacttggccatggtgaaaacagtatttatttaatcaatcgtgaattgcgaaatcgcttcggaaaaaatgttgatatcgttcctattatagcggatgtgcaaaatagagcgcgtatgtttgaaattatggaaatgtataaaccatacgcagtttatcatgcagcagcacacaagcacgtgccgttaatggaagacaaccctgaagaagcagtacgtaataatattttaggtacgaaaaatactgctgaagctgctaaaaatgcagaggtaaagaaattcgttatgatttctacggataaagccgttaatccgcctaatgtcatgggcgcttcaaagcgaattgcagaaatgattattcaaagtttaaatgatgaaacgcatcgaacaaattttgttgcagtgagatttggtaatgtacttggatcgagaggatctgtgattccacttttcaaaagtcaaattgaagaaggtgggccagttactgtgacacatcctgaaatgacacgttactttatgacaattcctgaagcttctagactagttttgcaggcaggggcattagcagaaggtggcgaagtatttgtgctagatatgggagaaccagtgaaaattgttgatttggcacgtaatttaattaagctaagtggtaaaaaagaggacgacatacgcattacttatacagggattagacccggcgaaaaaatgtttgaagagcttatgaataaagatgaagttcatcctgaacaagtatttgaaaaaatttatcgtggcaaagtacaacatatgaaatgtaatgaagttgaagccattattcaagacatcgtcaatgactttagtaaagaaaaaattattaactatgccaatggcaaaaagggagataattatgttcgatgacaaaattttattaattactgggggcacaggatcattcggtaatgctgttatgaaacggtttttagattctaatattaaagaaattcgtattttttcacgcgatgagaaaaaacaagatgacattcgaaaaaaatataataattcaaaattaaagttctacattggtgatgtgcgtgatagtcaaagtgtagaaacagcaatgcgagatgttgattacgtattccatgcagcagctttaaaacaagtgccgtcatgtgaattctttccagttgaggcagtgaagacaaatattattggtacagaaaatgtcttacaaagtgctattcatcaaaatgttaaaaaagtcatatgtttatctacagataaggcagcgtatcctattaatgctatgggtatttcaaaagcaatgatggaaaaagtattcgtagccaaatcaagaaatattcgtagtgaacaaacgcttatttgtggtacaagatacggtaatgtgatggcttcaagaggatcagtaatacctttgtttatcgacaaaatcaaagctggagaacctttaacgattacagatcctgatatgacaagatttttaatgagcttagaagatgcggtagaactagttgttcatgcatttaagcatgcagagacaggagatattatggttcaaaaagcaccaagctcaacggtaggggatcttgcgaccgcattattagaattgtttgaagctgataatgcaattgaaatcattggtacgcgacatggagaaaaaaaagcagaaacattgttgacgagagaagaatacgcacaatgtgaagatatgggtgattattttagagtgccggcagactccagagatttaaattatagtaattatgttgaaaccggtaacgaaaagattacgcaatcttatgaatataactccgataatacacatattttaacggtggaagagataaaagaaaaacttttaacactagaatatgttagaaacgaattgaatgattataaagcttcaatgagataggagagattgacgttgaatattgtaattacaggagcaaaaggttttgtaggaaaaaacttgaaagcagatttaacatcaacgacagatcatcatattttcgaagtacatcgacaaactaaagaggaagaattagaggcggcgttgttgaaagcagactttgtcgtgcatttagcgggagttaatcgacctgaacacgacaaagaattcagcttaggaaacgtgagttatttagatcatgtacttgatatattaactagaaatacgaaaaagccggcgatattattatcgtcttcaatacaagcaacacaagataatccttatggtgagagtaagttgcaaggggaacagctattaagagagtatgccgaagagtatggcaatacggtttatatttatcgatggccaaatttattcggtaagtggtgtaagccaaattataactcagtgattgcaacattttgttacaaaattgcacgtaacgaagagattcaagttaatgatcggaatgttgaactgacgctaaactacgtggatgatatcgtcgctgaaataaaacgtgctattgaaggaactccaacgattgaaaatggtgtacctacagtaccaaatgtatttaaagtgacattgggagaaattgtagatttattatacaagttcaaacagtcacgtctcgatcgaacattgccgaaattagataacttatttgaaaaagatttgtatagtacgtatttaagctatctacctagtacagactttagttatcccttacttatgaatgtggatgataggggttcttttacagaatttataaaaacaccggatcgtggtcaagtttctgtaaatatttctaagccaggtattactaaaggtaatcactggcatcatactaaaaacgaaaaatttctagtcgtatcaggtaaaggggtaattcgttttagacatgttaatgatgatgaaatcattgaatattatgtttctggcgacaaattagaagttgtagacataccagtaggatacacacataatattgaaaatttaggcgacacagatatggtaactattatgtgggtgaatgaaatgtttgatccaaatcagccagatacgtatttcttggaggtatagcgcatggaaaaactgaaattaatgacaatagttggtacaaggcctgaaatcattcgtttatcatcaacgattaaagcatgtgatcaatattttaatcagatattagtacacactggtcaaaattatgattatacattgaatcaaattttctttgatgatttggaattaagacaaccggaccactacttagaggcagttggaagtaaccttggagaaacgatggggaatattattgcgaagacatatgacgttttattacgcgaacaaccagatgcacttttaattcttggtgatacaaatagttgtttagcagcagtatctgctaaacgattaaagattcctgttttccacatggaagcgggtaatagatgctttgatcagaatgtacctgaagaaatcaatcgtaaaattgttgaccatgtcagtgatgtgaatctaccttatacggaacatagcagacgttatttattagatgaaggcttcaataaagcgaatatctttgtgacaggatcaccgatgacagaagtgatagaagcgcatcgagataaaattaatcacagtgacgttttaaataaactaggattagaaccgcaacaatacattttagtatctgcgcatagagaagagaatatcgataatgaaaagaattttaaatcattaatgaatgcgataaatgatattgccaaaaagtataaaatgcctgtgatttattcaacgcatccaagaagttggaagaaaattgaagaaagtaaatttgaatttgatccattagttaaacagttaaagccatttggtttctttgattataatgcattgcaaaaagatgcatttgttgtgctatcagatagtggaacattgtcagaagagtcgtctattttgaagttccctggtgtccttattcgaacttccacagaaagaccggaagtactagataaaggtacggttattgtaggtggtattacctataacaatctaatccaatccgttgaactagcaagagagatgcaaaacaataacgaaccgatgattgatgctattgattataaagacactaacgtttcgacaaaggtagttaaaattattcaaagctataaagatattatcaatcgaaatacttggaggaaatgacgatgaggatagcgattcttggcgctactaacattaagcatatgtcattattatcacattatttaaaccacattgatttgaatatcaatgaggtggacattatatacactgacaaatatgatatcgaagaacatatccaaggcatcaataattactataaatataaagtagatattaaagaagattggacatttatcaaaaaagctattgcttactatcgatttaggccatacgctatgaaaattcttaaagaaaatcattatgattttgtcatagtatggggaagttatacaggacacttatttaaaagttttttagaaaaacactataaaaataaattcattttaaatataagggactacttttttgaaaataataaacttattaagtatagaatgaaaaaaatcgttgatgctagcaggctgacaacattatcttcagaaggttttcttaaatttttacctaaatctgaaaaatatagaattatttatagttataacatgagtattattagagaaagtaatgtaaccgatggatttaaaaaaagatggccaattaatataggttttattggtaatgttagatttaatgagataaatcaaaaattgataaaggaactggcaaatgattcaaggttccatatgcaatattttggaacagggtcggaaaaattagaagtctttgctcgagaaaattttattaataatattacattttctggcggctttgacttgaaagaaacaccgaaatatttaaatgaaattgatatacttaataatttgtttggtaatcaaaatattgctttagatactgctttatccataagaatgtattatgcgttgtttttaaacaaacctattattacaacagacgatacattcaccgctacagaagctaataaattcggactgggttttagtattaatccagaaaatttaaaaggtattggtgatgaattgatggattggtataacaatttggatgtaatggacattaatcataaaagagaagcttatagaaacgatgtaattgaaaataataaacagttctatcaagagataggcaggatatttaatgaataagatatataatgtcacttcatatgttattgccattttaatgtttccttgccttatgttaggtgataaacctttattatttttagcacctataagttatggagtaggaaagctctttataagcttctcgaataatccgaattttaaattttcgaaaattgtatacgatgttttaggttttcttagattagtatttatacctgctatgatagtgtttttccaggattcaactatagataatttgccattaggacaagcttattttaatcaagcggttatttatatgagtgtggagtttatcataggctcgctatttatattgatactatctaaattattcaaacatgaagaggtatcaagaaatagctttacactttctggatcatcaatttattacattgtgtttggtcttgttatttgtgggatttttgtagcttttcccgaagtgcgcaaaaacatatcatttttaattattaaaacagatgcaatgggaagaggaaccgaagcaacaagtggtttaaatgttctttttgtaatgctatttcaacttgccttagcgttattattcttaataatcgcatatgcttcatataaaaagtataaagagaatcctaaaattatttatgttgtattaccgctagctataggaattttaaatattagtttaattgttggtgaaagaagaagttatcaactttatacaatggttgctgttttaacagtggtgtcaatcttgttttctaagcataaaagacgtatcaatatcattattatatctgtaggtattttcgtattagcattgatgacactatataaagaattgtatgtgtttaattatagttcgtatagcgaggcgttaaatagtacaagtgtaagtaatcttaaaatagttgacacgttgcagtcatatttttatggacctagcaatattgcagcttctatagactatttgaattactataatggttcgttcaaacaatatttattcgataataccagagctgtttttgggtttaatttctttttagataaaaagcagttgattactagccaactttttaaccaattgatatatggtagtaaacaattgactggtcatctaatttcgagtgctggatatggaattatttattttggacccttattcttctatttgaatttaattgcaaatatcttttttgcatttctgagtgagtatattattcggaagagtcattcgttagaagtgatatttattggtacatatatttatatgagacttattacgagtatttttagtcacccgacaccattaatcacattgatttctatgattttagttgtatatgttatagctattatcccaggcattataataaaaaaatttactaaaaaagtagggatagaatgattgtaaaaacatttatgaaatcgaaaatatttagattaatgaatacaccactattattattttataagaaagaatatttaactggatattattttgaaaataaagtggctggatggttatgggcgtggaaagctgttccgttcaagttgttaggaataaatatgagtttgccatttcctgcagatataactgttagaatgcataaccctaataacattgtttttgataaaaatgatattcatatttttcaatcgcccgggacgtattttaataatttttcagcagttatatatataggtagaggtgtttatatagcgcctaacgtaggtattattacagctaatcataatattaaaaatttgaagtcacatgcaccaggtgaagatgtcaaaatagggaattatagttggattggaatgaactcagttatattaccaggagtagaattgggggaacatacaattgtaggggctgggtcggttgtaacaaaaagttttccagaaggtaacgttgttataggtggcaatccagcgaaaatcatcaagaaaatctgaggttaattatgagattaaataaatttattggcgattcgtttttaatgattttaagcagtggcatcgctcaagtcatattaatcatcactaccccaattattacaagactatattcacctacagaatttggtgagtttacaattttttcaaatatcgcaatgattttaataccaataataaatgcaagatacgatttgttgattgtgaataccaaaaatgaccgtagtgctaatatactttcacaaatcagttttttgatatcattgcttattttattaatactgataccaatatttgcgattagtgcatgtttatacccaaactttatattagattttattttcattattattatgttgtttttggtaagtttaacaaacatttttacaaattatctaaataaggaaagaaagtataaagtgttaagtttgattaatgtgtttagagctggatcaatggctttacttcaaatcattttcggacttttagcattaggaagtttaggattaattattggtttttcattatcctatatcgcaggcattacactaggatataaaacgtttaaaaagcactttaatattgtgagagataaagaagaaactaaagcattatttttagaaaataaaaatcagttagtttattcaacaccatcaatattattaaatagtttgtctttctcggttgttgtgttctttataggtattttgtataccaatacagaagtgggtatttatggtatggccataagagtactaggcataccagtgacaattatttcattagggttatcaaaaatatttatgcaacaagccaatgactattatattgaacatggtaacttccgaaatttattacttaaatttagttccatactggttatagtttctataattctttatgtgccactttatttgttcagtgaagaattagtcaatatattattaggacacagctgggttgacgcaattacagttataaaaattgttatcccattatttgttataaggctgattgtatcaacggtatcactttctgtgattgtattacaaaaacaacagttagaattaatactacaagcgttatttttaataggtactactgcaacatttgttatatcaaaaatgcttaatttaacttttttaaactttgtatctattaatacaattgttttaatcgtatcgtacatgatatttttcatagcactctattattttgctaaaaataaacagttcaaaaattcttagtctaaattcattaataaaaaggacgtcgattagatgagtgaaaaaaagattttgattttatgtcagtatttttatccggaatatgtatcttctgcgacgttaccaactcaattggcggaagatttaattgcgaatcacattaatgtcgatgtcatgtgtggatggccatatgaatatagtaatcataaacaggttgctaaaaccgagatgcatcgtggaattcgcattcgacgtctcaagtattcgaggtttaataacaaaagtaaggttggaaggatcatcaatttctttagtttattttcaaaattcgtgattaatatacctaaaatgttgaaatatgatcagattcttgtttactctaatccaccaatcttgccattaataccagacattttacacagactgcttaagaaaaaatattcttttgtggtgtatgatatagcacctgataatgcgattaagacaggtgcaactcgtccaggtagcatgattgataaactgatgcgttacattaatagacatgtctacaagaatgctgaaaatgtcattgtccttggtacggaaatgaaaaactacttactaaatcatcaaatttctaaaaatgctgacaatattcatgtgattcctaactggtatgacatgcgtcagttacaagacaatcgtatctataatgacacatttaaagcttgccgtgagcaatacgacaaaattttattgtatagcggtaatatggggcagttacaggatatggagacacttatctcatttttaaaattaaataaggatcagcctcaaacgttaacaatactttgtggtcatggtaagaaatttgcagatgtcaaaacggcaatagaagaccatcgtattgaaaatgttaaaatgtttgagtttttaacaggtacagactatgctgacgtattaaaaattgcggatgtatgtattgcatcgctgattaaagaaggcgtcggtttaggcgtgccgagcaagaattatggctatcttgcagctaagaaagcgttggtactcatcatggataagcaatctgatatcgttcaacatgttgaacaatatgatgcgggtatccaaattgataatggcgatgcacatgccatttataacttcatcaacactcactcgagtaaggaattgcacgagatgggtgagcgcgcacatcaactgtttaaagataaatatacgagagaaattaatactatgaagtattacaatctgttgaagtgaggagataattatgaagcgattattcgatgtagtgagttcaatatatggtttagtagttttaagtccgattctgttaattacagcattactaattaaaatggaatcacctggaccagccattttcaaacaaaaaagaccgacgattaataatgaattgtttaatatttataagtttagatcaatgaaaatagacacacctaatgttgcaactgatttaatggattcaacatcgtatataacaaagacagggaaggtcattcgtaagacctctattgatgaattgccacaattattgaatgttttaaaaggagaaatgtcaattgtaggtcctagaccagcgctttataatcaatacgaattaatcgaaaaacgtacaaaagcgaacgtgcatacgattagaccaggtgtgacaggactagctcaagtgatggggagagatgatatcactgatgatcaaaaagtagcgtatgatcattattacttaacacatcaatctatgatgcttgatatgtatatcatatataaaacaattaaaaatatcgttacttcagaaggtgtgcatcactaatgagaaaaaatattttaattacaggcgtacatggatatatcggtaatgctttaaaagataagcttattgaacaaggacatcaagtagatcaaattaatgttaggaatcaattatggaagtcgacctcgttcaaagattatgatgttttaattcatacagcagctttggttcacaacaattcacctcaagcaaggctatctgattatatgcaagtgaatatgttgctgacgaaacaattggcacaaaaggctaaagctgaagacgttaaacaatttatttttatgagtactatggcagtttatggaaaagaaggtcatgttggtaaatcagatcaaattgatacacaaacaccaatgaatcctacgaccaactatggtatttccaaaaagttcgctgaacaagcattacaagagttgattagtgattcgtttaaagtagcaattgtgagaccaccaatgatttatggtgcacattgcccaggaaatttccaacggttaatgcaattgtcaaagcgactgccaatcattcccaatattaacaatcagcgcagtgcattatatattaaacatctgacagcatttattgatcaattaatatcattagaagtgacaggcgtgtatcatcctcaagatagtttttactttgatacatcgtcagtaatgtatgaaatacgtcgccaatcacatcgtaaaacggtattgatcaacatgccttcaatgctaaataagtattttaataagttgtcggtctttagaaaattattcggcaatttaatatacagcaatacgttatatgaaaataataatgcacttgaagttattcctggaaaaatgtcacttgttattgcggacatcatggatgaaacgacaaccaaagataaggcataagtcatctattaaataaaatcaacatacaaatcgttttatttggaggttatagtatgaagttaacagtagttggcttaggttatattggtttaccaacatcaattatgtttgcaaagcatggcgtcgatgtgcttggtgttgatattaatcagcaaacgattgataagttacaaagtggtcaaattagtattgaagaacctggattacaagagatttatgaagaggttctgtcatcgggaaaattgaaggtatctacaacgccagaagcatctgatgtttttatcattgccgttccgacgccgaataatgatgatcagtaccggtcatgtgacatttcgctagttatgcgtgcattagatagtattttactatttttaaaaaaagggaatactattattgtagagtcgacaattgcgcctaaaacgatggatgattttgtaaaaccagtcattgaaaatttagggtttacaataggtgaagatatttatttagtgcattgtccagaacgtgtactgccaggaaaaattttagaagaattagttcataacaatcgcatcattggcggtgtgactaaagcttgtattgaagcgggtaaacgtgtctatcgcacatttgttcagggagaaatgattgaaacagatgcacgtactgctgaaatgagtaagctaatggaaaacacatatagagacgtgaacattgctttagctaatgaattaacaaaaatttgcaacaacttaaatattaatgtattagatgtgattgaaatggcaaacaaacatccgcgtgttaatatccatcaacctggtccaggtgtaggcggtcattgtttagctgttgatccgtactttattattgctaaagaccctgaaaatgcaaagttaattcaaactggacgtgaaattaataattcaatgccggcctatgttgttgatacaacgaagcaaatcatcaaagcgttgagcgggaataaagtcacagtctttggtttaacttataaaggtgatgttgatgatataagagaatcaccagcatttgatatttatgagctattaaatcaagaaccagacatagaagtatgtgcttatgatccacatgttgaattagattttgtggaacatgatatgtcacatgctgtcaaagacgcatcgctagtattgattttaagtgatcactcagaatttaaaaatttatcggacagtcattttgataaaatgaagcataaagtgatttttgatacaaaaaatgttgtgaaatcatcatttgaagatgtatcgtattataattatggcaatatatttaattttatcgacaaataaaatgtgtcaaactagggcatacatgattaaggaaagataagctgtcatgtgtttgaacttcagagaggataatgttatgaaaaaaattatggttattttcggtacgagacccgaagcaataaaaatggcaccattagtaaaagaaattgatcataatgggaactttgaagcgaacattgtgattacagcacaacatagagatatgttagatagtgtgttaagtatatttgatattcaagctgatcatgatttaaatattatgcaagatcaacaaacattagcaggccttacggcgaatgcgcttgctaaacttgatagcatcattaatgaggaacagccggatatgattttagtacatggtgatactacaacgacttttgtaggaagtttggcagcattttatcatcaaattccggtcggacatgtagaagctggacttcgaacacatcagaaatactcaccatttcctgaagagttaaatcgagtcatggtaagtaatattgctgaattgaattttgcgccaacagtaattgcagctaaaaatttactttttgaaaacaaagacaaagagcgtatctttattactggaaatacagttattgacgcattgtcaacaacagttcaaaatgattttgtttcaacgattattaataaacataaaggcaagaaagttattttactaacagcgcatcgtcgtgaaaatattggggaaccgatgcatcagatttttaaagcagtaagagatttggcagatgaatataaagatgttgtcttcatttatccaatgcatcgtaatccaaaggtaagagcgattgccgaaaaatatttatctgggagaaatcggattgaattaattgagccattagatgcgattgagttccataattttacaaatcaatcgtacctcgtgctgacagattctggtggtattcaagaggaggctcctacatttggaaaacctgtgttggtattaaggaatcatacagagcgtcccgaaggcgttgaggcgggaacatcgagagtaattggcacagattatgacaatattgttcgaaatgtgaaacaattgattgaggatgatgaagcgtatcaacgtatgagtcaagcgaataatccatatggtgatggacaagcatcacgacgtatttgtgaagcaatagaatattattttggattgcgcacagacaagccggatgaattcgtacctttacgtcacaaataataaaaaacccctaatcatgaagttggtttagacaaccagcggtgactaggggtttttaatatatttatttttgatagtggtagccaatatcatatttgaatactttatttgataatattggactttgctgtccatcgtcatcactttttaaacgtacatttttatgagcttctttaaatacatcggaattcaaccaattattaaagctatcttcagattcccaaatagttaagattttaacttcgtctgtatcctcggtatttaatgttttagtgacaaacatttgttggaagccttcaatagtttcaataccttgtctattgtaaaaacgttcaatcgtttcttccgcactgcctttttgtaattgtaatctattttctgccataaacatgggcaatcactcctctattttattatttgatttgggtaatgtttttacaaatgtaaagagtacagcggtttgtatgataaccattatgattaatcctacacggactgcaagaacatccaccatataaattgaaaaacctattacaatgtataagctaattaaaattttaattttctgttgtagcgtgtagcctcgatgtaaataaaagttttctacatattctttataaattttttgattaataagccaattgtaaaagcgatctgaacttcgagcaaaacaaaaaactgctacgagtaaaaaaggggtcgttggcagtaaaggtaatacggcacctgcaataccaagcgctgtaaatattaagccaataacgattaaaataagtcgcattgaaaaaactccattctagtactaatgcgcatgtaatattgttttagtaatataaatcatgctaaatataatgtgtatgataagtgcaatgactcagtaaaatgaaacgttgttgaattatccttgtcctattaacgcattttaagcataactttcataacaaccaaactatttaatgagaattgttctcaagtattatagttatattatgtgttttatttttgaaaagtgcaatatgttttcgaaaataagattatttttatgtgcaaaaacgacgcaaaagttttaaaaatgagacttctgtgagctgattattttataaaatgtaaacgcttactatataatgtgaatcatatcgtttaaaagcattattaaatatgatgctaagagatttatattatagccaataaacaaaggagagataatatggcagtaaacgttcgagattatattgcagagaattatggtttatttatcaatggggaatttgttaaaggtagcagtgacgaaacaatcgaagtgactaatccagcaactggagaaacactatcacatattacaagagcaaaagataaagatgtcgatcatgcagtcaaagtggcgcaagaggcatttgaatcatggtcattaacttctaaatcagaacgtgcacaaatgttgcgtgatattggtgataaattaatggcacaaaaagataaaattgcaatgattgaaacattaaataatggtaaaccgattcgtgagacaacagcaattgatattccatttgctgcaagacatttccattatttcgcaagtgttattgaaacagaagaaggtacagtgaatgatatcgataaagacacaatgagtatcgtacgacatgagccgattggcgtcgtaggtgctgttgttgcttggaacttcccaatgctattagctgcatggaagattgcgccagccattgctgcaggtaatacaattgtggttcaaccttcgtcttcaacaccattaagtttattggaagttgctaaaattttccaagaggtattacctaaaggtgttgtcaatatactaacgggtaaaggttcagaatcaggtaatgcaattttcaatcatgatggtgtagataaattatcatttacgggctcaactgatgtaggttatcaagttgccgaagctgcagcaaaacatctagtacccgctacattagagcttggtggtaaaagcgccaatatcatattagatgatgctaatttagacattgcagttgaaggtattcagttaggtattttattcaaccaaggtgaagtatgtagtgcaggttctcgattattagttcatgaaaaaatttataatcaattggtgccacgtttacaagaggcattttcaaatattgaagttggagacccacaagatgaagctacacaaatgggtagtcaaactggtaaggatcaattagataaaattcaatcatatattgatgcagcaaaagaatcagatgcacaaattttagcaggcggtcatcgcttaactgaaaatggattagataaagggttcttctttgagccgacattaattgctgtgccagacaatcatcacaaattagcacaagaagaaatatttggaccagtgttaacagttattaaagtgaaggacgatcaagaagcaattgatatagctaatgattctgagtatggtttagcaggcggtgtattttctcaaaatatcacacgtgcattaaatattgctaaagctgtacgtacaggacgtatttggattaacacttacaaccaagtaccagaaggcgcaccatttggtggttataaaaaatcaggtatcggtcgagaaacttataaaggtgcgttaagtaactatcaacaagttaaaaatatttatattgatacaagcaatgctttaaaaggtttgtactagaataaatatcgtttctgaagcgtgtttgtaggtcagtctagcggtaagtcttaacatttaacggcgttgtttagattttaagcaaaacaaaatatataggaacacgtatcatgatattaggatataatgactaaaataatagcagtaggatggtttttaattgcaaatcatcttactgctttttttaattatgctaatttgcgatgcggctattataaggacagagttgtttattaattatggtgatttagaaatatgaagttcaatatgcaaagtcatcgtttgttttaatatgtggaacaatcattaaagttattgtgattttttgaacttaatgaaactaaacaataaatttgagatacttttttgtcatttttatgtaactaacacaataatctcgtacattattaaaattttctatatgatagggataaagtaaagagcgagtgtgctgtaaaagtttttccaaggtgatattacataaaggtataaagggtaaagattaatgagttgtcatgtgaagaacgatggtgtataaattatggttaattacggaagcattaatattaatctgagaagctataaagaattatttttaaaagcgacaatattaaatacgacgcatttatttaggagtggcaaacgtatgaatgggaaaaaggcgaatacgataaacagatacaaatattttcatcatgtcaatcatcaaaaaattcaacaaagttctaaaaagacgctgtgggcatcactaatcatcacattgttatttacagtgattgaatttgtcggaggtttagtatctaattcattggcattactgtcagattcatttcatatgcttagtgatgtattagcacttggtttatctatgttggccatttattttgcaagtaaaaagccgactgcacgatacacatttggatatttaagatttgagatattagctgcatttttaaatggtttagcattaattgtaatttcaatctggattttatatgaagctattgtacgtattatttatccgcaaccaattgaaagtggcattatgtttatgattgctagtattggtttactcgttaatattattttgacaattatccttgtaaggtctttaaaacaagaagacaatatcaatattcaaagtgcattatggcatttcatgggagacttattgaactctattggtgtcatcgttgcagttgtattgatttactttacaggatggcgcatcatcgacccaatcattagtattgtaatttcactcatcattttacgtggtggttataaaattacgcgtaatgcgtggttaattttaatggaaagtgtgcctcaacatttggatactgatcaaattatggcagatattaaaaacatagatggcatattagatgtacatgaatttcatttgtggagtattacaacagagcattattcattaagtgcccatgttgtgttagataaaaaatatgagggtgatgattatcaagcgattgatcaagtatcatcattgttgaaagaaaaatatggcattgcacattcaacgttgcaaattgaaaacttgcaattgaatccattagacgagccatacttcgacaaattaacataaataaaacattgtacaggctgggacataaatcaatgttctatgctctacgaagttatattggcagtagttgactgaacgaaaatgcgcttgtaacaagcttttttcaattctagtcaggggccccaacacagagaatttcgaaaagaaattctacaggtaatgcaagttggggtgtgggccccaacaaagagaaattggattcccaatttctacagacaatgcaagttggcggggccccaacatagaagctggcggaaagtcagcttacaataatgtgcaagttggggtgggacaacgaaataaattttgcgaaaatatcatttctgtcccactcccacgtttgttttggattatgttgcatcatttaaatgattttcgtcaatttctttgatgctatctacatctaacacgacatctttaggtttcaaaatatgaatatgtttttcatcatttgtatgtaaaatgcgttctatgatgtatctttgaccggccattgtttctacagcaatctttttgtttctagctaaacttgctacgacagattctttatccataatgatagccccctatatatatgtttatttacttataccctaacatgatttttatactctttgaaaatatattttacagaattttatctaaatatttaaaaaaatcgctcaatatccttgtaatccgataagaattatagtaatattttttcaaccattgttataggaggtcttattaatgacattatttttattagaagctaacaatcttgattttgcatcaacgaaagaagaactagaagcaaaggcagcatcactatctacgaagacaattccaacattaattgaagtacaagctactgaaaatttaactcatggttattttattgtggaagcaaatgacgaagcagaagctaaacaatttttaacagaagcagatattagtattcaattagtcaaagaagtacgcttagttggtaaagatttagatgaagttaaaaatggtgatgcacatgttgattaccttgtaacttggaacattccggaaggcattacgatggatcaatatttagcacgtaaaaagaaaaattctgttcattatgaagaagtgccagaagttgaatttaaacgcacatatgtatgtgaagatatgtctaaatgtatttgtttatacaacgcacctgatgaagaagcggtacgtcgcgcgcgcaaagcagttgatacaccgattgatggcatcgaaaaactttaataagacaacaagttgatgagatatatgtatttaggtttgacatggatttcgattgcagttaattagaatagctcaatgctataaatgtaagtagttgatatgaagaaactaatgaactaaatgcaagtattgtctaaaacaatcattttattgaaatttagtagagctgaaattaatataacgtcgttaattgaataacgcttatgttataagagcactcataccaaaccataatcatctatagatataacaattcacgatataagggctgtgtttggcatagccctttagatatacacttaattcctattaaaatagtagggattaaaagggggcttgtcatgattaaaattcaacaattacaacatcactttggatcacataaagtaattcataactttaatttggacattagcaagggagaaatagtcactttcatagggaaaagtggttgcggaaagtctactttactcaatattatcggtggatttattcatccatcgtctggtcgtgtcattattgataacgaaattaaacaacagccatctccagattgtttaatgctatttcaacatcataatttgctgccatggaaaacgattaatgacaacattaggattggatttcaacagaaaattagtgatgaagagattaacgcacagcttaaattagttgatttagaagacaggggaaagcattttcccgagcaactgtccgggggtatgaaacaacgtgtggcactatgtcgagcgcatgtgcataagcctaacgttatattgatggatgagccattaggtgcattagatgcatttacacgttataaacttcaggatcaactagtgcaactaaaacataaaacgcaatcaactattattttagtgacgcatgacattgatgaagctatttatctttccgaccgcattgttctgttaggtgaagggtgcaatattatttctcaatatgaaattacagcatcacatccacgcagtcgtaatgatagccacctacttaagattcgtaatgaaattatggaaacatttgcattgaatcatcatcaagttgaacctgaatattatttataaggagtgagtgacgatgaaaaggttaagcataatcgtcatcattggaatctttataattacaggatgtgattggcaaaggacgtctaaagaaccgtctaaaaatgcccaaaatcagcaagtgattaaaattggatatttgccgattacacattcagctaatttgatgatgactaaaaaattattatcacaatacaatcatccgaaatataaactagaattagttaaattcaataattggccagatttaatggacgcattaaacagtggtcgtattgatggtgcatcaactttaatagagctagcgatgaaatcaaaacagaagggctcaaatataaaggctgtggcattgggccatcatgaaggcaatgtcattatgggacaaaaaggtatgcacttaaatgaatttaataataatggcgatgattaccattttggtataccacatcgttattcaacacattatcttttacttgaggaattacgtaaacaattaaagattaaaccggggcattttagctatcatgaaatgtcgccagcagaaatgccagccgcattgagtgaacacagaattacagggtattctgtagccgaaccattcggtgcactgggtgaaaagttaggcaaaggtaagactttgaaacatggtgatgacgttatacctgatgcgtattgctgtgtgctagtactgagaggagaattgcttgatcaacacaaggatgtagcgcaagcatttgtacaagattataaaaagtctggctttaaaatgaatgatcgcaagcaaagtgtagacattatgacgcatcattttaaacaaagtcgtgacgttttaacacagtcagcggcatggacatcctatggtgatttaacaattaagccatccggctatcaagaaattacgacattggtaaaacaacatcatttgtttaatccacctgcatatgatgactttgttgaaccgtcattgtataaggaggcatcgcgttcatgacacgtcccacaaataacaaatttatattacctattatcacatttattattttcttaggcatttgggaaatggtcattattattgggcattaccaacctgtattgttacctggtcctgctcttgtaggaaaaagtatatggactttcattgttactggagaaattttccaacatttagcaattagtttatggagatttgtagcgggctttgttgtcgcattgttggttgctattccattgggcttcttgcttggaaggaatcgttggctatacaacgctatcgaaccgctatttcaattgattagaccgatatctccgatagcatgggcaccatttgttgttctatggtttggtattggtagtttgccagcgattgcgattatttttatcgctgcttttttcccaattgtgttcaatactattaaaggcgttagagacattgaacctcaatatttaaaaatagcggcaaatttaaatttaactgggtggtcattgtatcgcaatatattatttcccggggcatttaaacaaatcatggctgggatacatatggcggtaggaacaagttggatatttttagtttctggtgaaatgattggtgcacaatcgggattaggttttttaatcgttgatgcacgaaatatgttgaacttagaagatgttttagcagcaatattctttatcggattatttggttttattattgatcgattcattagttatattgagcagtttatacttagaagatttggtgaataaggagagatgatgatgactttagaaacgcttatcaaagaacaattagatcctcatttagtagaagttgatgaagggacgtattatccgagaacatttattcaacaattatttgtagatggttatttcggtgaggcggcattgagaaaaaatgctgaagtaatcgaagctgtatcgcagtcttgtttgacaacaggattttgtttatggtgccaattagctttttcaacgtatttagaaaatgccacgcagccacatttaaataatgacttacaacagcaattgttatctggagaaatattaggtgctaccggattgtctaatccgatgaagtcatttaatgatttagaaaagttgaaccttgaacacacttatgttgatggacaattggttgtcagtggacgtatgccagctgtaagtaatattcaagaagaccattattttggtgcgatttcgaaacatgaatcatcagatgaatttgtcatgttcattctacgtgccaatcaagatggtatcactctcgttgaaaaaacaaattttttaggggtcaacgggtcagcaacgtatcaaatcacattgaatcaagtcgtagtgccacaatcacaaatcatcacgcatgatgcgaagcagtttgcggcaactattcgcccgcaatttattgcttaccaaattccaataggattaggctcaattaaaagttctttagagttaattgatgcattttcaaatgcgcaaaacggaataaatcaatatttagagtatgatgttgaagcttttaaaaaacgttatcgtcaacttagagaggaatattatgcaatattagatgacggtaacttaacttcacatttaagtgaattaatatcattgaagaaggacatcggctatttattgttagatgtaaatcaagcttctgtcgtcaatggtggttcaagagcgtacacaccatattcgccacaagttcgcaagttaaaagaaggattcttcttcgcagcattaacgccgacattaagacatttaggtaaacttgaagcagagttgaaggggtaagtgtgataagctgattttttgtttagatgcgtttgttgaaacattttttaaaataatataaatcttagtttataaacattttctgttaatttgttatatccttttaactaggaaaatatacatttcgtaataataataatcgttatcattgaaaaagtgttaataaggtgtataataaaaatgtgaacaattaatgaacttcttattttaaagaaggtgaatactatagatacgcatactaaagaacaacaattctcgaatctagtaagatcttatcgtaaagaatacgtgggtaaaggacccaatagtattcgagtgtcgtttaaagataattgggcgattgcacatatgacaggtgttttgagtaaagttgagagtttttacctaaacgacaaacgcaatgaatcaatgctccattatacacgcacagagaagattaaacagatgtataaagaaatagatgtaaatgagatggaaagtcttgtaggcgctaagtttgtaaaattatttacagatattgatttgaatgatgatgaagtcatttcaatatttgttttcgataagtcaatagaataagtgttgctggtgtaaggtacacggtgctgtttgctaacttcgctttgaatttaacaataattcaagggggtggtatgtcaaacggtgccgttttttttgtcatatttttaaaacaagcaacatgcaacacgtactttaaggaagtcaaaatttatcatttaggagagatggatatgaaaatcgtagcattatttccagaagcagtagaaggtcaagaaaatcaattacttaatactaaaaaagcattaggattaaaaacatttttagaggaaagaggacatgagttcattatattagcagataatggtgaagacttagataaacatttaccagatatggatgtgattattagtgcgccattttatcctgcatatatgactcgtgaacgtattgaaaaagcaccgaacttgaaattagcaattacagcaggtgtaggatctgaccatgtagatttagcggcagcaagtgaacacaatattggtgtcgttgaagttacaggaagtaatacagttagtgtggcagaacatgcggttatggatttattaatacttcttagaaactatgaagaaggtcatcgtcaatcagtagaaggtgaatggaacttgtctcaagtaggtaatcatgcgcatgaattacaacacaaaacaattggtatttttggatttggtcgaattggacaacttgttgctgaaagattagcgccatttaatgtaacattacaacactatgatccaatcaatcaacaagaccataaattgtctaaatttgtaagctttgatgaacttgtttcatcaagtgatgcgattacaattcatgcaccattaacaccagaaactgataacttatttgataaagatgttttaagtcgtatgaaaaaacacagttatttagtgaatactgcacgtggtaaaattgtaaatcgcgatgcgttagttgaagcgttagcatccgagcatttacaaggatatgctggtgatgtttggtatccacaacctgcacctgctgatcatccatggagaacaatgcctagaaatgctatgacggttcactattcaggtatgactttagaagcacaaaaacgcattgaagatggagttaaagatattttagagcgtttcttcaatcatgaacctttccaagataaagatattattgttgcaagtggtcgtattgctagtaaaagttatacagctaaatagaataaggatgctgggctagcgattaacgctttcaattttatataaatgaatcatataagcactactgctgttgtaaagatggcagtagtttttttatgattacatctaagtatagtcacggctatgttaggacaatgatttaacatttacgcacatatgtgttcacttacgcaattattgataaatttcattcatttggaataatatatagtcatatagtgctaatttttttgaggcattatatgcaagatgcattgtaaaatcgatgcatttgtttgttaaataactttgtataactaaaaattctttgtttcaacgtataatctaataatagattttatataaatggtagtgtgtatatatgtggataggggtgtagttattaatgaaacgcttaagtacgactttgaaagtacgattgattagcaattttttacagctaattattacgacagcatttataccgtttatagcactatatttaacagatatgttaagtcaatcaattgtcggtatatatcttgttggtttagtggttctaaaatttccattgtccattatatctggttaccttattgagatttttccgaaaaagttgctagtacttatttatcaagcgacgatggtgataatgcttgtgttcatgggcgtatttgggtcacatcaattgtggcaaattattggtttttgtgttgcatatgccatatttacaatcgtttggggattacaatttccagttatggacacattaattatggatgcaattaccgaagacgtggaacattatatttacaagattagctattggatgacgaacttatcggtagctattggggcattgttaggtggcttgatgtatggctacagtatgttactacttttcttaatagcagcttgtatatttttaattgtactctttattttatatatttggttacctcaagaccgaaatcaagtaaagcaaagtgatgacaagaggcatgcaagtcgttatcaaaaattacaaataatgaatatatttcgcagttataaattagttttgaaagaccgtaattatatgttattgatttcggggttcagtatcatcatgatgggtgaattttcaatctcctcatatattgctattagactaaaggatcagtttgaaacaataagtataggttcatatgatattacaggtgctaagatgttagcaatcttgctaatgattaatacggtcgtcgtcattttactcacgtattcaatctcgaaagttgtattgaaaatagattttaaaaaagctttaatcactggtttgctgatttatattgttggctatagtggtctaacctatcttaatcagtttggcttattagttgtttttatgataattgcgactgtaggtgagattatttattcgcctatagtttcagaacaacgctttaaaattattcctaaagctaaaagaggaacatatagtgcagttaatgcattaggtattcatttttcagaaacactagctaggttagggattgtgttgggtgttttcttaacgtcattacaaatgggactgtatatgtttatcgttttaacaattggtgctagcatgcttgttgctggtgtattcgggggacaaaaacaagtgaatacaaattgaatttatttaaatatttattttatgcatctttttatattgaaaacctattaatttggtcgtaattaaaatagagataaatttattaagaatttgttaaaatttaaggataacaattgttttatgcgagttgtttgtttaatataaacttgcttcatggatattttgtaacaacaatattgaatttgcaatgagatatgaacaagagaaagtgattaacgagttgtagtgtgctatttatcgaagatgtatgtaatttacattgaaaaatataccaattgtaacgatgatacaagatgtattttagggtagaatatatcgctcatatgttgcgaatggtgttttatattaatcattacataacgagttaattaacatttcgtcggttatcatttcatcatgcaatttcagtaagtaatgagtattatgatatgaaagaaggactttttatgattatgggtaatttgagatttcaacaggaatattttcgtatatacaaaaataatacagaatcaacgacacaccgtaatgcgtattgggttaaactcgctaaaaatgttgaagctactaaaatgatgtatgcattatcgacaattgtgcaacaacatgcatctataagacatttttttgatgttactaccgatgacaatttaacaatgatacttcatgaatttctgccttttattgagataaaacaagttccatcttcttccgtaaactatgatttagaagctttttttaagcaagaattaagtacttaccattttaatgattcacctttattcaaatttaaattgtttcagttcgctgatgctgcatatataatattagattttcatgtgtccattttcgatgatagtcaaattgatattttcattgatgatttatgcaatgcatatcgtggcaatactgttattaacaatactcgacagcatgcacatttaaatagaaatgatgataagcacaatcaagatgcatcgcatatagcattagactcaaactattttcggttagagaataactctgacatccatattgatagttatttaccaattaagcatccatttgagcaagctttatatcaaacgtatttgattgatgatatgacatcaatagatatggcatcgttggctgttagtatgtatttagctaatcatataatgagtcaacaacatgatgtcacattaggtatacatgtaccatcacatttaccaaatgatttacacggaaatattgtgccattaacgttaacaatcgatgcaaaagatgtatgtcaacgttttacaacagattttaacaaatgtgtgttgcaaaatatgtcgcaattacagtgcgcgaagtcttcgctttcattagagactatttttcattgttatcatcatatgatgtcttgttgtaatgatgttattgaggatgtacatcaaatacatgatgcacatacatctttagcggatattgaaatttttccacatcaacacgggttcaaaattatatataacagtgcagcatatgatttgctctcaatcgagacgctaagtgacttagttcgtaatatttatttgcaaatcactgaagaaaatggaaataaacgaacaactgtagatgaacttaatttgatgacagagcgtgatattcaattatatgacgatatcaatttaagtttgcctgaaatagatgatgcgcaaacagttgttaccttatttgagcaacaagttgaagcaacgccgaatcatgtcgctgtgcaatttgacggagtgtttataacatatcaaacattgaatgcacgcgcgaatgatttagcacaccgtttgagaaaccagtacggtgttgaacctaatgatcgtgtcgctgtcattgctgaaaaaagtattgagatgataatagcgatgataggtgtgttgaaagctggtggggcttacgtgccaattgatacgaactatccaagtgatcgtcaggagtacattttaaaagatgcaacgcctaaagttgtaataacgtaccaagctttatgtgaaaatggtaaacaaaatattaatcacattgatttgaacaagatagcgtggaaaaatattgataatctttctaaatgtaacacgttagaagatcatgcgtatgttatttacacgtcggggacaactggtaaccctaaagggacactaattccacaccgaggtattgttcgcttggtccatcaaaatcattatgtaccattaaatgaaaagacgacgattttgttatcaggaactatagcctttgatgctgcaacatttgaaatatatggtgcattgctcaatggtggaaaactgattgttgctaaaaaagaacaattattaaatccaatagcgttagaacaattgatcaatgaaaatgacgttaatactatgtggttaacctcctcattatttaatcagattgctagtgaacgaatagaagtattggtaccgttaaagtatttattaattggtggagaagtattgaatgctaagtgggtggatttgcttaatcaaagatcgaagcatcctcaaattattaatggttatggaccaactgaaaatacaacatttacaacgacgtataatatacctaacaaagttccaaatcgtattcctattggtaaaccaattcttggtactcatgtttatatcatgcaaggcgagcgtcgatgtggtgttggtattcctggagaattatgtacaagtggctttgggttagctgcaggttatttaaatcagccagaattaacagcagataaatttatcaaagattcaaatataaatcagctgatgtatagaagtggtgatatcgttcgtctgttacccgatggcaacatagattatttatatcgaaaggacaaacaagttaagattcgagggtttaggattgaattgtcagagattgagcatgcgctcgagcgtatacaaggtattaataaagctgttgttattgttcaaaatcataatcaagatcagtatatcgttgcttattatgaagcgatgcatacattatcacataataagattaaatcacaattacgtatgaccttaccggagtacatgataccagttaattttatgcatattgagcaaattcctattactattaatgggaaattagataagaaggcattgcctatcatggactatgtcgatacggatgcctatgtagcaccgagtacagataccgaacacttgctatgccaaatttttgcagatattttacatgtgaatcaagtaggtattcatgataatttctttgaattaggtggccattcattaaaagcaacgttagtggtgaatcggatagaggcatctactgggaaacgattacaaattggtgatttattacaaaagccaactgtatttgaactagcacaagcgattgctaaggttcaagaacaaaactatgaagtgattccagaagctatagttaaagatgattatgtgctgagctctgcacaaaagcgtatgtatttattatggaaatcaaaccataaagatacggtgtataacgtaccttttttatggcggttatcatcaggacttaatgtagctcaattgcaacaagcagttcagcatttgatagcgcgacatgagattctacgaacacaatatattgttgtagatgatgaggttcgacaacgtattgtggcagatgttgtagctgactttgaagaagttaacacgcattttacggatgaacaagaaatcatgcgccaatttgtggcaccttttaatttggaaaagccaagtcaaattagagtgagatacattagaagtcccttacatgcatacctgtttatagatacacatcatatcattaatgacggtatgagtaatatacaattaatgaatgatcttaacgcactttatcaacataaattattgttaccacttaaattgcaatataaagactatagtgagtggatgtcgcatcgtgatatgacgaaacatagacaatattggttatctcaattcaaagatgaagtacctattttaagcttaccgacagactatgttagaccaaatattaaaacgacaaatggagcaatgatgacatttacaatgaatcaacaaatgagacagctacttcaaaagtatgtagaaaagcatcaaattactgattttatgttctttatgagtgtggttatgacgttgttaagcagatatgctcgaaaagatgatgttgttgtcggtagtgtgatgagtgcgcgtatgcataaaggcacggagcaaatgctaggcatgtttgctaatacgttggtatatagagggcaaccgtcacctgataaaatgtggacacagtttttacaagaggttaaggaaatgagtttggaggcatacgagcatcaagaatacccattcgaatgtttagtaaatgacttagatcaatcacatgatgcctcacggaatccattatttgatgtcatgttagtactacaaaacaatgaaacgaatcatgctcattttgggcatagtaaattaacacacattcaacccaaatcagtgacggcgaaatttgatttatctttcatcattgaagaagatcgcgatgactatataatcaatatcgagtataataccgatttatatcactcagaaacagttcgtcacatgggtaatcaatgtatgattatgattgattatattttgaagcatcaagatacactacaaatttgtgatataccaaacggcacggaggaacttctaaattgggtcaatacgcatgttaacgatcgaatgcttaatgtcccgggaaataaatctatcataagttactttaatgaagctgtctcacgacaaggtaatcatgttgcgctagtcatgaatgatttgacaatgacgtatgaaacattacgcaactatgtggatgccattgcgcacatgcttctatcaaatggtgtgggcaatggtcaacgggttgccttgtttacagaacgtagttttgaaatgattgcggcgatgttggcgacagttaaagtaggtgcatcttatatacctatcgatattgattttccgaaaaagcgacaaggcgcaattttggaggatgctaaagtaactgcagtcatgtcttacggcgttgaaattgaaacgacattaccagtcattcaattggaaaatgctaaaggctttgttgaatcaaaggaaaatgaacaatatgatgatttacatggcaatcaacttgaaaacacagcgatgttagataatgagatgtatgctatttacacatctggtacgaccgggatgcctaaaggggttgccatacgacaacgaaatttgttgaatttagtgcatgcatggtcaactgaattgcaattaggcgacaatgaagtatttttgcaacatgcaaatattgtttttgatgcatcagttatggagatttattgttgtttgttaaatggtcatacgcttgtgattccagatagagaggaacgtgttaatccagaacagttacaacaactcattaataagcatcgtgtgacggttgcgtcgattccgttacagatgtgtagtattatggaagacttttatattgaaaagttgattacaggcggggcaactagtacggcatcctttgttaaatatattgagaagcattgtggcacgtatttcaatgcctatggaccatctgagtcaacagtcatcacatcgttttggtcacatcattgtggtgatttgatacctgagacgattccaattggcaaacccttatctaacatccaagtgtatattatgtcagatggtttgttatgcggtattggtatgccaggcgagttgtgtattgcaggtgatagtttagcgataggatatattaaccgtccagaattaatggctgataaatggcaaaataatccatttggtaaaggaaagttgtatcatagtggtgatttagcacgttatacatctgatggtcaaattgaatttttaggaagaatagataaacaagtgaaagttaacgggtaccgtattgaacttgatgaaattgaaaatgtaatattagctattcgtggtatatctgattgtgttgtaacagtaagtcactttgatacgcatgatatattgaatgcttattatgtcggagagcaacaagtggagcaggatttgaagcaatatttaaatgatcagctgcctaagtatatgattcctaagactataacgcatatcgattgtatgccattaaccacgaatgacaaggtggatactacgcgtttgccaaatccatcacctatacaacagtctaataaagtgtatagcgaaccctctaatgaaattgagcagacatttgttgatgtatttggagaggtattgaaacaaaatgatgtcggtgttgacgatgatttctttgaacttggtggtaactcattagaggcgatgttagttgtctcgcatttaaaacgatttggccatcatatttcaatgcagacattataccaatataaaaccgtgcgacagattgttaattatatgcaccaaaatcaacaatcattagttgcattaccggataatctttcggaattacaaaagattgttatgtctcgttataacttgggtattttagaggatagtctaagtcatcgacctataggaaatacactattgactggcgcgacagggtttttaggtgcttatctgattgaagcactacaaggatacagtcatcgcatttattgtttcatacgtgctgataatgaggaaatagcatggtataagttgatgacgaatttaaatgattatttttcagaagagacggttgaaataatgttatcaaacattgaagtcattgttggtgatttcgagtgtatggatgatgttgttttaccagaaaacatggatacgattattcatgcaggtgctcgtacagatcactttggtgatgatgatgaatttgaaaaagtaaatgttcaaggtactgttgatgtcatacgtttggcacaacaacatcatgcaaggttaatatatgtgtctacgataagtgtgggaacttattttgatatagacacagaagatgtgacattttcagaagcggatgtctataaagggcaactactaacatcaccatatacacggagcaaattttatagtgaattaaaagtattagaagctgtaaataatggcttagatggtcggattgtacgtgttggtaatttgacgaatccttacaatggaagatggcatatgagaaatataaagactaaccgtttttcaatggtaatgaatgatttgttacaactggattgtatcggggttagcatggctgaaatgcctgtagatttttcttttgtggatacgactgcaagacaaattgtcgcattagcacaggtcaacacaccacaaatcatttaccatgtgctatcacctaataaaatgccggtgaaatctttgttagaatgcgttaagcgcaaagaaattgaactcgtcagcgatgaatcatttaatgaaattttacagaaacaagacatgtacgaaacgattggattaactagtgttgaccgtgaacaacaactagcaatgatagatacaacattaacattaaaaataatgaatcacatcagtgaaaaatggccaacgataactaacaattggctgtatcattgggcacaatatatcaaaacaatattcaataagtaagtagggaaagttatgacagtatttgtaatgcaattacagagtaacttgaaaagtattgaagaattaatatcacaaagtcgttggtcatataaaaaaccgcgtacagtcaactatagatacaatcaagataaactcatgcacagattgggagatattttagtgcaatatggaattcaacatgacacaggtttattaccacatgaatggcattatcacatttcgccacgaggtaaggcagatattgttcaacacaatcgtgatggacagcccatctatgtgagcttatcatatagttatccttatatcgtgtgtgttgtcgataaagaaccagttggtattgatatcgaaaagatatcacaacgtttagactggcgtacgttagtgacgtgtttctctacaaacgaagcacatcaaatatgtagtttaaatgatttttatcaaatatggacacaaaaagaaagttttacaaaattgattggtgaaggtttaatcaaaggattggatatttatgatatgacacaatcacacttttatcaatcacgtgaagtgaagttcaaacaatttatttttgatcagtttatggtacaggtatgtttcttaggacaggcaccctggggttataaaaaagtgtctgtatttcagttattgagtagttaatatgacgtctgacagtatcattgcgcagtgattttaaactatactgcctaaatgtttactgttagatgtttttttattggaaaaacgaaaggtgaatacacgatggcatcattcaaaatcatgacgagattaaagtaagtgataaggtgaaaatatactgagcaatattgaaattaccgaaaataatagtttgttgcgacgcatttgagactttaatgctcacgtaagttggctggaatcatatcatgtcagttaataaaataacgtgagcatcaatcatcatactcaaacgatgatttaaaactcacgtcaatgttagtcagtgtattaatttaatttatagcgatagacaaaatgttgtcgcactaattcaattgtcatcatccagacgatatggccaaagaattctgacagatgctcttggaatggttgatcccacacagcaggtacagtatgcatgattggcataatgataaggtggaataatacccaaatagcaataccaaaaacagcaccttgtcccattgctaagtaagcgtattttttaactaatatgcagtaaataattgcaatgacgatagaaaaactaaagtggacaataaagcttacccaaggcaattccatatttgaaaatgtatatgtttgatgcgtaaactcactactaaatcctaattgttgcaataactcttgaggtgggttcgttgcattacgttctggtgtgcgaggtggaaacatgacctcccaacctaattttacaattccagataacaagccaccgataattccagcataaatgaatatacccatttgtcgtttcgtcaacttaaggactcctctctatttactatcctcattatagtattttgtgaaaataatcacaataaaaagctttgcaaaacttaaaatattttgataaacaaatttgtaaaaggttattagttttttacatctcatattgtatcgtactgtattcaaaattgttaacgagatgaacggtaaataaatgttttagcgcaatggataatcgaactggaatcatcgcgtgtcaaaacttgttaggccttaatttcatagttatgaattaaggattgttgtgccaacaaaatcattattgtaaatagattcaatgatatttggcttgtttcctgatgcaatgataactttaggacagccattttcaatcgcatttttggcatctagcactttgggaatcatacctccataaatatcaccatgttcaatatattgatgaatatcgactaatggcaattgaggtataaccacatcattgatgagtacacctgcaatattacttaatacataaataggcgcttttaatgatgatgcaataaaataggcaagcgtgtcagcattaatattgtaaaattctccatcatggttattgaaaccaatcgaattgatgataggtacaaatttagtacatatatactgtaaagcatccttatttaaagcggtcgggacaccgacatatccatattgttgatcaaaacgtttaatttcaaataattgagcatccaaaccacataagcctatcgcagaacattggtgctggttaaattgagctactaatgcagtgttaacgtctgcaatgagcgtgtgtttagtaatggtcatggttgctttatcagtcactcttaggccattaacaaagtgtggctcgatttgctggtttgataatgcatcattaataaatgggccaccgccatgaacgataatagggtagatgttgtttaatcgtaaatgcttaatattgttaataattgatggatgcatgtcactaagtgtactgccaccaattttaatgacaataaatttcatctaaccaacaccaccttatgttcgatatgatgcgttgatacgcacataatcataggataaatcacaaccgtatgcagtcgctgcagcgttacctaaaccaagctgaacgtcaattgtgacattttcatgagttaatgtattcgacatagcttgctcatcaaatagtacagccatacctttatcaacgacaggtatttggttcagttgaacatatgtgcagttaggatcaatttcacatccgctgtagccaatagctgtaatgattcgaccaaaattggcatcttcgccaaaaatagctgattttactagatttgaacttacgatagttttaccgatttttcttgcatctgatattgatttagcgcctgacacattgacgctgattaactttgttgcgccttcgccatctctggctatagctttagctaaaaatgtacagacaaaattgaatgcatcaacaaatgtttcccattgtggatggtcttgactaagtatttggtgttcaacttggtgatttgccatgactaataccatgtcatttgtacttgtatcgccatcaacagtaatcatattaaatgtatggtcagtcgaagattttaataattgatgaagtgtattcgattcaatcgatgcatcggttgttataaaagcaagcatggtagccatatttgggtgaatcatacctgaacctttggcgctaccaccaattgtaacggttttaccatcgatttttagtgatacagcgatatgttttgtacaggtatcagttgttaaaattgcctcgttaaacgcacctggcgttgcaaaattagcatccttaatatgttcggtcccagtcttaattttatccataggcaaatattcaccaatgaccccagttgaagcaacagcaacatgctcagatggtatttgaagttgttgagcaacccatgtttgtgtttgtcgtgcatcatctatgccttgttgaccggtacaagaatttgcattagctgaattaacaacaagtgcttgtaattttcctttagacttttgtaaagtgtcttcagtgacaataagtggtgcagctttaaactgatttaaagtatatacggcagctgcacttgccaaagacgatgagtaaatccacccaaagtcttttttgttagcgcgtaaaccgatgtgcataccaccagccgtgaagccttgaggtgtactgatatcgccatgtttaataattgaaaagttatattgttgtgatgtcgtttcttgatgtttcattctaacaccccttatggataaactggtgattgatttaggccagtcgtcacttcaaaatcatataatatatttaaattttgaatggcttgcccacttgcgcctttgacaaggttatcaatcactgatactaaaattgctgtttgcgttgtttcatctacatagatgccgatatcgcagtagttactaccgagtacttcttttgtggttggaaaagtcccaatatctctaattctgacaaatggctgattagcataataagaggtcattaatttatgtaatgattcagtcgtatattcagatgataatttgacatatattgttgataaaatacctcgtgtcattggtacgagatgtggtgtaaatatgactgatacatcttgacccgcaatgatagataaatattgctcgatttccggtttgtgtttatggtttccgattgcataagcgcttagattttcattcatttctgaaaaatgaacacgttgtgataatgaacgaccagcacctgacacgccggtcttagcatcaataataatagatgacaaatctactattttttcgctaataagtggatgtaatgctaataatgttgctgtagggaaacagccaggattagaaatgagcttcgttccattgttatcaaacgattgccattctgaaatgctgtaaatagcatgattcaaatcatcttgtgctgcagcagtttctttgtaatatgcttcatatatttcacgattcttaattctaaatgcgccagataaatcgataacatgaatacctttttctactaagggagggatacatgttttacttacgggtgctggtgtcgcaaagaaaattacatcacagtcattattgtccactgtaagtgcttcgaaatgttgcataatatgttgtaaatgtggaaatgttaatttcaacggttcatctacttttgaatgtgagtagatgtgtgcaatcgttacatgaggatgtgtttgtaacaatcgaattaattcaattgcgccataaccgctaccgccaacgatacctactttaatcatcatgaatccctcctatgtcatatataaatgattaattgttaatttttaaaaacgtcttgaaaagctgcaacaatttgatggatttcctctttatcaatgactagaggtggagacaatcgaatgatagtacgatgcgtgtctttgcataagattccacgttgaatcagttgatccacaaaaggtgcagcatctgtgttaagctctatgcctataaataaaccacgacctctaatttctttaatactaggatgtttaagttgtagcaacgcttttaataaaaatgaacctaagcgttctgatcgttcaaccagttgttcatctttaagtacatcaagcgctgccgtcgatattgcaatggctaaagggttaccaccaaatgtcgaaccatgtgtacctggtgttagaacacgcatgacatcattatttgcaagtacagcagatacagggtataagccgccacccaatgccttacctaaaatataaatgtctggaacaacttgctcccattccatcgcaaaccatttcccagttctaccaagaccaacttgaatttcatctgcaatcaataatatttgatgtttatcacatagatgacgcacagcttgaatatatcctttcggtggtatattaacgccaccttcaccttgaattggttccaaaataattgctgctgtatttggtgaaatagcttgtgttaattgttcaatgtctccaaaatctacagttgtagtgccttgaagtagggggtgaaatcctgctttatatgcgtcgtggttagatagtgataatgagccaagtgtacgaccgtgaaaattgttattcatagcgatgatttcaacttgtccgtcagtaatgcctttaacttcagagccccattttctagcaattttaatggctgcttcaacagcttcagtaccagagttaagggggagtactttgtctttcttagcaagatgacaaattttttcttcccatttcccgagattgtcactataaaggacacgtgaaatgatagacaactttgaagcttgttctgtcatcgctttaacaattgttggatgacaatggccttggtttgcaactgaaaaacccgaaatgcaatctatatattgtttgccatcagtatcccaaactttgacacctttacctttagaaatgacaagcttaagtggtgcataattattagagctataataatcagttaattcaatgattgaattcatcggtctccctcctttatatttatacaatttaaagaattaatattaatatattacagttgttcaatataagtgtcaaatgtaaatttaataatataaagataaggttgtgtttgtattaatgtgatttgtaaaatgaaagtactaatattttttgtggataatcattgatatgtatgtatacgattgcagtttaatgtagtatgaataaaaaatgccacaagcatatgtttaacatatgactgtggcatagtattatgcttgtggaattttacgatgcttaattttataaataatgaagccgataatgaaaccaatcaaactgagaacaacccagcccataccaatgtctgataatggtaaatatttttggctgaaattaatcaaagtttgtgagaatgatgtgcttgaaatgaactctggactagcttttaatccatctactaatgcagcaatcattgtaaagaaaatggtacattgataaataatttttgaatgatggaatttgctactaaataatgttagtacaatcaaggcaattgctaatggatataagaacattaacactgggactgagtacataataattttagttaagccaacattcgcgaataagaacgaaataaagctcacaactgttgcaatcgctaggtaattcagtttcgggaataaatgctcaaatgtttctgaaaatgccgtaattaaaccgatggctgtttttaaacaagcaaccataacgataagtgacaacaggacgataccgtagttacctaagtagtattgcgtaatttgcgctaaggcaataccaccattttcactaagtttgaaatgaccaatacttaatgtacccatgattgctagtagggtataaatgatccccatcataatgatactgatagtaccagacttaattgtttctttagcgatatcagttggattttcgatacctaactttttaatcgttgcaacaatgatgataccaaatgccaatgacgctagcgcatctaaggtattgtatccatctaaaaagccgttaaataaggcatgtgattgatattgtttactaataggtgcatcagatatgccacctaatggatggataaaagcaaataataaaataattgctaataatactaagaataccggatttaaaaatttaccgatatattctaaaattcttgatggctttctcgcaaaaaaccatgcaatcacaaagaagacgaagctaaaaataaataaatataaagtgatttgctttggtgataaaaatggcgaaaatgcaatttcaaatgatgtcgttgccagtctaggtaaggcgaaaaatggtccgataactagatataaggcaatcgtgaaaatgtaagcatatgttttattaacacgcgatgcaatttcaaataaaccagatgtctttgaaatgccaatagcaatgatacctagaaatggtaagccaattgctgtaattaaaaatcctaagttagcgataaaaacgttagaaccagcagcttgacccaagtgtattgggaagataagattgccggcaccaaagaataaaccaaataacatagaacctataaacatgttttctttaaatgttagtttcttcttcatatatgtatttgttctcctttttagaacttataaaaatctacttaattaagataatatcaaaaattaaacataaagtgatacataattttgcaataaatactaaattttttgaaaattccggaataaatactgttttttatgtagtaggggcgtaagttaagaacgatttaacagatatagaatatgttaaatatagaaggttagacaacccgacgtattaatactttgtgaaataaagatccccctcaacatgattgaaggggggaagtatatgtttagttcaatacatttagaaagtcgtttgtagttattgtttgtcccatcaatgggaatacattatctattggaaattgatgtagcgtttcgttttgtgcactcatcatatctgtaacaaaaaactgattgtagtttaattgataggcatctcgcgctgtcgtatctacgccaatatgcgttgcgacaccaccaagaacaatcgtatcaattcctcgacgtcgcaattgtaagtccaaatctgttcctacaaatgcactaaaatgtcgtttgtctatgacaaaatcgtcatctctcttgtctaataaatgatggaaacgactgtagtcgtcgccttcttttggtggtaatgagatcattgcatttggttgcaatacatctttaccatcatagaaattcacgcgaacaaaagcgataaagccattgttttttctaaaaacatctattaatttattagcgttttgaacgacattttcagctgtatgtggcgcataatccatcttaagtataccttcttgcaggtcgattaacactaaagcggttttattaaaattaatcatcttatatcagagtccttttcgtttaataaagtattcgcttaaacttataccctgtttacgatgaaattatttattttgttgtgaaaaagctttagcgatatcgatgagtttcttcggtgcgtcttcgacagacattttgacttcgacaaaatgcatcacatcgggatgaccattaattgcattaaacgtgtcttgtaaatcttttgatgattcaacgtcatgaatttcaacatttttaccaccaaatacagctggtaaagctttataatcccacatgtgaatttcattataaggttcatacatgccgtgaataagtcgttctaccgtatagccgtcattattaatcacaaataataccggtttaatatgctgtctaatcatagttgaaatagcttgaacagttagttgcaatgagccatcaccaattaataataagttacgacgatctttgtctgctaattgtgaacctaatgttgcaggtaatgtatagccgatagaaccccataacggttgccctataaaagtattgtttttgtataatgctaaatcataagcaccaaagaatgatgtaccttgatcagcaataatgacatcatttggttttaagaaattttgcatcattttaaaataagtttgttgtgttaatggttctgtgccaactgtataatcgggtgatgttggacgatgatacgcagggaacgttgcgttattcgtatgtgaaatattggataactgttttaacaatgatggtagagatatttcatcatttgtaacatcgtcaattttgatattgtgatgatttaacataacgacatcatcgatattgaattggtatgaaaaacctgctgttgctgaatctgttaatttggctccaatatttaaaattaaatcgctgttgtccacataatctcgtattttatcttcggcaattttcccatcgtaaatacccatataatatggattttcctcattaaaagcaccttttcctaatgaaagttgtgctactggtatctgtgtttgatttacaaaatcttctaattcttgatgaaggtgaaaactgttaatttcatgtccagtaatgatgataggctgcttcgattgatgcaatttagatgttaataactctatatatgttgatgcatccgtatctttggctgccgttacttcaaatggtgtcggtatctcaatttcagagattgcgacatcgattggtaaatgtaaatgaactgggcgtctttcggcgattgctgtattaattaaacgtggtatttcggttgttgcattttcaggtgtgatataaccttgtgcaacggttatatgtgcaaacatttttcggtagtcgtcaaatgtaccttcaccaagtgagtgatgtacatatttaccggcatgttcaacagcacgtgtcggcgcacctgtaatcgcaatgacaggtatgcgttcagcatatgaacctgcgataccgttgacggcacttaattcgccaacaccaaatgtagtaactaatgcagcgagtccattaagacgggcataaccgtccgctgcgtaacttgcgtttaattcatttgtatttcctacccaatctacattgggattgctgataatatcgtctagaaaagcgagattaaaatcaccaggaacaccaaaaattttatcgacgcctgctcgatgaatagcgtcaattaagtaagctccaatgcgttgtttcataaaaaaaccaccttttctctatatttacacttaaaatgatagcctcgaatatagtgtaaggtcaaggaagttgactttgttgtgaaaacgctaacaatagtgaacaattaatattttttaggaaatgagtatgaagggggggtttaattgatgatcttaaaattcaaaatttaaggggagagcgaactatcaatgatgctgcaaaatacaatagcaaagaaaaaacaggcgcgtcaccttatgaaggtatacgcacctgtttatagtaagcattatttagcttcaaataattgatcgccaaatgaaatgttgccatgttcaccttgtttaaaatcaaggtttgtaatgtttccttgtgtcacgataataggcgtaatatcactctttgcatgattgcggatgtagtctaaatcaaagttgattaataaatcaccttgtttaacttcttgaccttcctcaacatgtaaagtaaagccttctccgtttaatttaacagtgtctaaaccgatgtggattaatagttctaaaccactatctgatacaagaccaattgcatgttttgttgggaaaatcatttgtactttaccgttgaatggtgcacgaacttcaccttgtgaaggtttaatagcgataccgtcacccatcattttttcgctgaacacttgatcaggcacttctgataatggtgttacttcaccagttaatggtgcatgcacgatatggctcaattcgctagttgcagatttatcttctgcaacaacaacagtttcgtctttatcgtcttccatagtagtagggttttctactacttgaccattcataatctgttgcatttcatgtttgatttggtcagattttggaccaaaaatcgcttgcatattattgccgacttctaatacaccggatgcacctaaatctttcaaaccaggaacatcaactttagatttgtcgttaacttcaacacgtagacgtgtgatacaagcgtctaaatgtttaatgtttgctttaccacccatagcttctaatactgcatatggtaattcagttgctgaagcagtagccgcttgtgattgtttatcttcacgacctggtgttttgtattttaattttacaattaagaatcggaatacgaagtagtaaataactgcgtatacaagacctacaggaataactaaccaccattgtgtcttattaggtagtataccgagtaagaagtagtcgatgaaaccacctgagaatgtataacctagatgaagatctaataagtacaatgttaagaatgataaaccatcaagtactgcgtgaataaagaataataatggtgctacaaataagaatgagaattctaatggttctgtaataccagttaagaatgatgttaaagcagcagaacccattaaacctgctactactttcttattttcaggtttagctgtgtgataaattgctaaagctgctgcaggtaaaccgaacatcataacagggaattcaccttgcatgaatttaccagctgtcaaatgtgcgccttcacgaatttgttcgataaagatacgttggtcaccgtgaataatttcaccagctgcatttttccatgaaccaaactcgaaccagaacggtgcgtggaaaatgtgatgtagaccgaatggaattaataaacgcttgatgaaaccaaataagaatacggcaacaccagtatttgaatctaataatcctgtactgaatgcatttaatcctgattgaatcgttggccaaattaatgccattgggaatgctaaaataaatgatgttgtagccatcataataggtacgaaacgcttaccagcgaagaaacctaaataagatggtaagttaatgttatagaacttgttataacaccaagctgccagggccccgattataataccgccgaacacacctgtttgtaatgttgggatacctaaaatgctagcgtaaccactcgctggatcaccaatattcttaggtgtaacttgtaaaaagtcgcccattgttttgttcatgattatgtaaccgacgaatgctgcgatagctgctacgccatcaccgccagctaatccgattgcgacacctaatgcgaaaatcataggcaagttatcaaaaatgataccaccagcacctgtcattaatttagcgacagtttgtacgccaccattttgtataaacggcaagtagtgttgtaatgattcaccttgcatagctgtaccgatagctaataacagaccagctgctggtaaaatcgcaacaggtaacattagcgctttaccaatacgttgcaattgaccgaaaagtttcttcctcacttgtccaacctccaaagttgtatttattatttaagattcaataaaaaaagacacgagcaaatagactgtgttggtaaccatcacagcttaatttaactcatgcctaatcttacttagtaacacgttggtgtatgtaattaatgtaaaagaagcaattgactaagtagtatataaaactgatacgttagtttatctagcttaccatcacatcttattgaatcttatttgtttgcgactcctattttagcatggtgaagtatgcgttttcaatacaattattaaattcaatttcaaatctcttaattgttcacagattattattaaaacataatataagataatcctgaataaaatgtataaaagttgttgtaataattcagcagtagcagctattatcagcacttaaaagaaaggataatctttgatggtgtaataattaacttgtgacagaaatatgtaagattattacaatgaacaggctttaactgattaatattgtaatgtgttttctcttatagtaaaatgtaagcgattacacaactcaactatattttcctaataattatattgttaaggagggctactttgacaggcttttcagtgtatttaggacaacctttagatgaagcgtatattaagcgaatgattaaacaaggttaccaaatgatttttacatctgtacaaataccagaagaagatgacgagacaaaatatcattatttcacaaaactactcaatttattaaaacatgaacaagtgacttacctcatagatgctaatccatctattttaacaccatctttttatgagcatcttcgacaatatgatgcacaatttatgattcgtatcgatcatagtacatcaattgaggcaatcgaagcgataatggcacagggtttaaagtgctgtttgaatgcaagtattatttcccgggaattgttaacaagcttacatcaacaattgaatgattttacattactttcattttgtcataactattatccaagaccagatacgggattatctgttgacttggtcaataagaaaaatgaactcatttatcaatttaatccaaaggcacaaatatatggttttattgtagggagtggtttgcgaggtcctttgcataaaggcttgccaacaattgaagcaacgagacatagtcatcctgtcgttgcagctaaattattacaagaaactggtgtatctgaagtgttagttggagactcattgattgaaatgaggcaggcaaaacaacttatagatttttgcaagcataggcatttcacgttatgtattgaagaagtgtttgatacgacagtgacttaccttttcgatatgtgtcataaagtacgcccggataatccggaaaatgtcattcgttcggaaacgtcaagacaaatatgtccacattcgattcaaccacagtttacgacgcaacgacgcattggttcagtaaccgttgataatttgaataacggacgttatcaaggcgaaatgcaaattgtgagacaaacgcttagtgcacatgacaatgtgaatgttgttgcacaaattattaaagaagacttaccactgttaagttgtatcgagccgaatgatacatttgattttcaaaaaactagggagtgtaagaagtgatggaaaatagtacgaccgaagcgcgtaatgaagcgacgatgcatcttgatgaaatgactgtggaagaggctttaattacgatgaataaagaagatcagcaagtcccgttagcagttcgaaaggcaataccacaattgacaaaagtaattaaaaaaacaattgcacagtataaaaagggtggacgattgatctatatcggtgcaggtacaagtggaagattgggtgtcttagatgcagcggagtgtgtacctacattcaatactgaccctcatgaaattataggtattattgctggtggacaacatgctatgacgatggctgtagaaggtgcggaagatcacaaaaaattagcggaagaagatttgaaaaatatagatttaacatcaaaagatgtcgttataggaattgccgcgagtggcaaaacgccatatgttataggcggtttaacatttgctaacacaatcggtgctacaacagtatctatttcatgcaatgaacatgcagttataagtgaaattgcgcagtatccagtagaagttaaagttggtccagaagtattaactggttcaacgcgtttaaagtctggtacagcacaaaaattaattttaaatatgatttcaaccatcacaatggttggtgtcggaaaagtttatgataacctcatgattgatgttaaagcaaccaatcaaaaactgatcgaccgttcagtgcgtattattcaagaaatatgtgctatcacatatgatgaagcaatggtgttatatcaggtgtctgagcatgatgtgaaagttgcgacagttatgggtatgtgtggcatttctaaggaagaagcaacaagacggttattaaacaatggtgacattgttaaacgagcaatcagagatagacaaccttaggagggatttaaatgaccaaagaacaacaacttgcagaacgaattattgctgcagtaggtggtatggataatatagatagtgtcatgaactgtatgacacgtgtgcgtattaaagtattagatgaaaataaagtagatgaccaagaactaaggcatattgatggtgtcatgggtgttatacacgatgaacgcattcaagttgtggttggacctggtacagtcaataaagtggctaatcatatggcggaattaagtggtgttaaactaggtgaccaaataccacacaatcacaatgatagtgaaaaaatggactataaatcatatgcagctgataaagcaaaggcgaataaagaagcacataaagcaaaacaaaagaatggtaagttgaataaagtattgaaatcaattgccaatatctttataccgttgattcctgcatttattggagctggattaattggtggtattgcagcagtactgagtaacttaatggtggcaggctatatttcaggtgcttggattacgcaacttataacagtatttaatgtcattaaagacggtatgttagcatacttagctattttcactggtattaatgcggctaaagaatttggtgcgacaccaggacttggtggcgtgattggtggtacaacgttattaacgggtattgctggtaaaaatattttaatgaatgtcttcactggagaaccattgcaacctggacaaggtgggattattggcgttatttttgccgtttggattttaagtattgtcgaaaagagattgcataaaattgtgccaaatgcgattgatattattgtaacgccgactattgcattgttgattgtaggactattaactatctttatctttatgccattagcaggttttgtttcagacagtttagtttcagtagttaacggaattattagtattggtggcgtatttagtggatttatcattggagcaagcttcctaccattagttatgttagggcttcatcatatttttacgccaattcatatagaaatgattaaccaatctggtgctacttacttattgccaattgcagcgatggctggtgctggacaagtaggtgccgcattagcactttgggtaagatgtaaacgcaacacaacattacgtaatactttaaaaggtgcattgccagttggtttcctaggtatcggagaaccattaatctatggtgtgactttgccgttaggtcgacctttcttaactgcttgtattggtggtggtattggtggcgctgtaataggtggaattggacatattggtgccaaagcaataggcccaagtggtgtgtcactattaccattaatctcagataatatgtatttaggttatattgcaggattacttgctgcgtatgctggtggattcgtttgtacatatttatttggaacgacaaaggcgatgcgacagacagatttgttgggtgattaatgatgacaaatattttatatcgcattgataagcagttgagtgattttacgaagacagaaaagataatcgctgattacattttaaagaatccacataaaatcattgatatgactgtgaatgatttggcagatgttacgaatgttagtacagcatcaattgttagatttagtcggaaaatgacacatcaaggttttcaagagctaaagattgcgatatctcgatacttacccgaagatattgcaaccaatccacatttagaattgattgaaaatgaatctgtagaaactttgaaaaataaaatgattgctagagcaacgaatacgatgcgatttgtagctactaatattatggatgcgcaaattgatgcaatttgtgatgtgttgaaaaatgccaggacaatatttttatttggatttggcgcatcgagtttgactattggtgatctttttcaaaagttatctcgtattggcttaaatgtcaggttattacatgaaacgcatttacttgtgtcaacatttgcgacgcatgatgatagagattgcatgatttttgtgacgaatcaaggtagtcatagtgaattgcagtcaattgcacaggtggccacacattacagtattcccatcataactatatctagtacagctaataatccagtggctcaaattgcagactatgcattgatttatggcagaactgatgaaaatgaaatgcgtatggcggctacaacgtcactatttgcacagttattcacggtagatatattgtactatcgatttgtagcattaaattatcatgcgattctagattgtataacccaatcgaaaatggcacttgataattacaggaagcatcttgcgacgatagattttaaacattagatattgtgtgcgttctaacataaagttagttgcaacgtaaacaattgaagtttttgatgtgattcagttgcttgatgaaaaattgttgctacaagtttgtaaaactggcatagaggctattttgaaaatgataaaggcgtgacaaattaaagcaaagttcagatttgagctttgcttttttcatagatggaaattaaatgctgaagaataattttaatgctaaatgaactaatacgaaggtgctaaaagcaattattatcaaattagtgatatgaatgaaatgtttaaatcgtttgcgttgattgtattcgggacttttatagagtaggtagtagtacataaagagtatggctgcgaacatgccgaatattgaagtgaagttacctacagtgactgccatgtaatgatttaaagttaaatagtaacttagactaataataaaaaataaaatgatttgataggtaattaacaccattcaagtccctccattaatcgtagacaaaaaatttatcaatgatttgattatttgtattcaaattttagtatacgacttacctcaaagacaaatattaaaagataagacaataaaattagaataaatttacgtttgaagataaaaaacaaacatttttcattaaagtttatgatatatttagagcaatagaaagtgtatggaaggggatatgaatggcataccaaagtgaatacgcattagaaaatgaaatgatgaatcaacttgaacaattgggttacgaaagagtaacaatacgtgataataagcaattgcttgataattttagaacgattttaaatgagcgtcatgcggacaaattagaaggcaatcccttaacagataaagaatttcaacgtctgttaacgatgattgatgggaaaagtatcttcgagagtgcccgtattttacgtgataaattaccacttagacgtgatgatgagtctgaggtttatttgtcgtttttagatacgaaaagttggtgtaaaaataagtttcaagtgacgaatcaagtatctgtcgaggatacatataaagcacgttatgatgtaacgatattaatcaacggactaccccttgtccaagttgaattgaaacgtcgaggtattgatattaatgaggcgtttaaccaagtaaaacgttaccgcaaacaaaattacacaggcttattccgctacatacaaatgtttatcattagtaatggtgttgaaacgcgatacttttctaataatgatagcgaactattgaagagtcacatgttttattggagtgataaacagaataaccgaatcaatacattacaatcgtttgctgagtcgtttatgagaccttgtcaattagctaagatgatatcgcgctatatgattattaatgaaacagatagaatactgatggcaatgcgtccgtatcaagtgtatgcggtagaagcacttattcaacaagcgactgagacagggaataatggatatgtatggcatacaactggaagtggtaagacattgacttcttttaaagcgagtcagattttatcacagcaagatgacattaagaaagttatctttttggttgaccgtaaagacttggatagtcaaacagaagaggaatttaataaatttgctaagggtgctgtagacaaaacttttaatacctcgcaactggtacgccaactaaatgataaaagtttgccacttattgtaacgacgatacaaaaaatggctaaagcgattcaaggtaatgcccatttattagaacagtataaaacgaataaagttgtatttattattgatgagtgtcatcgcagtcaatttggtgacatgcatcgtctagttaaacaacatttcaaaaatgcccaatactttggattcactggtacgccacgttttccagaaaatagtagtcaagatggtagaacaactgcagatattttcggtagatgcttacatacgtatttaattagagatgccattcatgatggtaatgtacttggtttctcagttgactatattaatacttttaaaaataaagctttaaaagcagaagataacagcatggttgaagcaattgatacggaagaagtatggttagcggataaacgtgtggaattagtaacacgacatatcatcaataatcatgataaatatacacgtaatcgtcaatattcaagtatatttacagtccaaagtattcacgcgcttattaaatattatgagacatttaagcgacttaacaaaaagttggaacaaccgttaacgatagctggtatatttacgtttaaacctaatgaagatgatcgtgatggtgaagtgccatatcattcacgtgaaaaattagagataatgattagtgattataataaaaagttcgagacgaatttttcaacagacacaactaatgagtattttaatcatatttcaaaaaacgttaaaaagggcgttaaagatagtaaaattgatatcttaatcgttgttaatatgttcttaactggttttgatagtaaagtactgaacactttatatgttgataagaatttaatgtatcatgatttaattcaagcgtattcacgtacaaatagggttgaaaaagaatcaaagccatttggtaaaattgtaaactatcgtgacttgaaaaaagagacagacgatgcactgagagtattctcacaaacaaatgatacggatacaattttaatgcgcagttatgaagagtataaaaaagaatttatggacgcttatcgtgagcttaaaatgattgtgccgacaccacacatggttgatgacattcaagatgaagaagagctaaagcgctttgttgaagcttatcgtttattagctaaaataatattacgtttaaaagcatttgacgagtttgagtttacaattgatgaaattggaatggatgaacaagagaatgaagactataaaagtaaatatttagctgtgtacgatcaagtaaaaagagcgacggctgagaaaaataaagtatccattttaaatgatattgatttcgaaatagaaatgatgcgtaatgatacgattaatgtgaattatattatgaatatattgagacaaattgatcttgaagacaaagcggaacaacgtcgtaaccaagaacaaattagacgcattttagatcatgcagatgatccgacattgaggttaaaacgagatctaattagagaattcatcgacaatgttgtaccttctttaaataaggatgatgatatcgatcaagaatatgttaatttcgaaagtattaaaaaagaagcggagttcaaaggatttgctggagagagatctatcgatgaacaagccctaaaaacaatttcaaatgactaccagtatagtggtgttgtaaacccacatcaccttaaaaaaatgattggtgatttgccattgaaagaaaagcgtaaagcaagaaaagccattgaatctttcgtggcagaaacaactgaaaaatacggtgtgtaatgattcagccccctcgctagattagtgtagggggcattattattttctatcttttgtaagttatcatgtatttggcaatcatcacttggtttcaatacaattttatcatcgtatgcgtatagaaataatgtctataggcatttaaaatagtttataatattaacaggataagtattaaatgtatgttgaaggaggtgcatagctatggataatagaaatatgattaatcgtgtttttagtcaaaagatattacatcaaattgcaatcaaaaataaaagtgatgttgttgatgaggcatatgatttttatatacagggacctaaaaatatcaatgtaatacagaagatgaaatctttatataattatcttaaaaagtcttatcgtaacgaatatttttacaaaaacacaatacttaataaactccttctaggacgacattctattaatacaactactgcactttctgagatgcccatagggaaaagtattgctgattttatattgttaaacggcaaaggcgttgtctatgagattaaaacagaattagataagctggatagattagataatcaaattaatgattattatgaagtgtttaattatgtagtagttattacaaatgacaaacatctgaataaagttatggctagatacaaagatacaacagttggaattttagtgttaacaactagaaatacactgagtgaagttcaaaaacctaaagaaaacaatagtctcttaaacacaaaagcgatgtataactttttacgaaaagaagaaagaaaaagagttattgcacaaaatcatatggatgtgccaacttataatgatttcacagagtatgatgtgttatttgacgtgtttaaagaaataccaatgacgaaactgcataacaatatgatttctgagttgaaaaaaagaggcaacatgaaagaatacaaagatgaatttttagcagcgccggctgaaattaagttcttgttatatttcgcaaaaatgacaaagaaagataaaaataaactatatcattttcttaaggaggattaatatgtattatccttatttgcgtgggaaacaaaatgaactatttgcaattagagaattgttagagaaaggtttgattggtgattgtattcaacctataattgaaccgattaagtatacaaccacgtttaaaaatgttttgaaatattgtggtgaaaaagaatttcgtataaatttagtagtaaattcgaagttaactgaagaagagattagtaacgaaactgttgaagacttaagcgaaataataacaaaaaacaaaagtgttattcaaaaagcttacttgggtccttctgatgaaggcgatgataggttgaaacagcaattttcaagtaatagtttagctattttaacaagtgtagatgactgggaaatgtttggagataaaaataaacttgaaatggtttttgtaccagatgatagacacattaaacgtaaattgcgtaatattccaaacaaaggcatcattatggatccttttaataaactaagtcgtaatgttgattatttagataatgatgacgagttttatagcgacgatcacctttattataaggaagatggatacgtagcattttcagactattctgttataggtggagaatatgtagacggtggcttttcgccattagctattgcgatacatattgtctattttgatgaggctaatgagttaagagttaaacattttgtctctgattctaataacgatagattaaatccagctaaaaagttttttgaggctgtagataaattagtaacttggtctaaaaacttagataataaaaatagatcttatgcaatcggacaatttgaagaattaaatgaaaataataagtatccaggattaggtttaattaaaaggttatctatcatgcatcatctagaaattatgaatagatacttggagtctcaaaatgaaaatatgtgaaaaatgttttaataatactgaaatcgtagaaatcattgtaaatgataatagcaaatttgacaattgtgatattgataacgatcatcttggtgttaaaatatttgatacgactcgacacatagataaattagagcagattagagattatttaagaccagcgttagaattatatgatattagtataaatttaccagatacttttagccaaaaagaaggtaaaaaaattgaaacagcattaaaagatgattggagtatatttaatgttgaagaagctcaaataagttgtattttaaatgaactttttaaagatgatgaaaatatagatagacgggtgttggaaggtttagtaagcgctaaaatcattaaagataaaaaatatacaaatgaaaatctaattgtagcaaataatgactgggatggattttgtgagagcttgaagtataaaaatagatttcataataatatgatcaatttagagaatttagcgttctttctcgatatcactactaattactatagtattgaggaatttagagaaagatttgaaccattatatagatctagaatagttaagttcattacagagaaaagtgaactaatgtcaccaccaaagggatttgcaacggcaggaagattgaattctaaatggataagcgtattataccttagtacaaaagaacaggtcagtatagaagaagttaaacctaagcataatgacattatttatataggtaaggttaagttacaaaaaaacgttacaaaagagaaattgaaaattgcgaatttaactaatttaactagtaatgcaatcaaagctggcgatgatggatttagaaagtattttgtaaatcaccaaacattaaaaaagattcataaaggaataacaaatccaagcgatgaacaaggaatagattatttgccatttcaatatttagctgattatattcgaagccttaaatatgacgggataatgtatgagagcatattgcaagatggtacttttaactttgtgttttttgatcaaaatttatttgaatgtgttaattatgaaagaaaaagagtaagtgatgttaaatatacattgactaagctaagttgacacactcggaaatctgaatattctaataaaatataaataatcccccgcacttcacatagtggcgggggatttattctggcgttaaaatgcccaaagtatgggggtgactcttaaatcatggcaaggcacttaaaacttgatatggtgccgagccctaacttagcacaatatagttagtatgacaaagtcatctaacataacacatcagaggttgcccgtttatttcagaccatacagtgataaagttgcacaacgcatgacttttatttagcaataactgctacttctgaaataagttgctttgcatagtctgactgcggatgtttaataatatcttctgtgttattcagttcaacgatttcgccatttttcataactgcaacgcgatcacatatttcattgataacacccatgtcatgtgtgatgaataaataagtgatgccgaagtctaactgtaattgttttaataactcgatgatatctttttgaattgaaacgtctaaagcggacactgcctcgtcgcaaacaatcactttaggttctacagcaagtgctctcgcgatacttacacgctgacgttgcccaccagataattcgtgtggatagcgatataagaaactttgatctaggccaaccttttctaacaacgatacgacagttttaataatgtcatcattatctttgactttcccatgaatgattagtggtcgtttaatcacatcaatgactttaaatcttggattaatagatgcgaatggatcttgaaaaatcatttgtatctcttgtcgtaaagatttcaattcatcatctttaaataaacttaatggtaattcgttataccaaataaagccttctgacacttcctttagaccgacgaccgtcttagctaatgtcgatttccctgaccctgactcaccaacaatgcctaatgtttcgccttttctaatagccaagttaatatcattaactgctcggtataggctgccacttggtgacttgtaatccacgctcacacgatcgaattttaataaaatatcattgtttaacaatcttggcggacgcgtttgatgaatatcaggaattgcatctattaagcgtttcgtataggtatgttgtggcgatttaaaaatactttcaaccgtgccactttcaacgacacttccatctttcattacaatcacatcgtcgcaaaattgatacacagcacctaaatcgtgagtgataaaaataatagacgtttctgtgtactcataaagggacttcattaactgcagtaattgattttgtgtactggcatctaatgccgttgttggttcatctgcgattaaaatttgtggctttaaaatcaatgccattgctatcatgacacgttgacgcataccaccagaaagttcatgtggataagcatcaaattgtcgagttgcatgttttatacctactttttctaaaatgtctattgtcatcgactttgcttcagatttagatacacgtttatgttgaaatattacttctgtaatttgtttgccaatcgttaatcttggattcaacgaagagagtggatcttgaaaaatcattgaaatatccttacctcgaatttgttgtaacgctgaagttgataaattatttaacgattgcccattaaaaataatttctcctgttaatgtgtgatctggataatctggtagtagccctaaaatagatttagcggtaatactttttcctgatcctgattcaccaacaatacctaggatatgtttttttcgtaattcgaaagagacgttttttaccgcttgaactgtagtttcatcataattgaattgtacattcagactgttgacttctaataaatttgacatgatgttgtgcctccctattcacaaatgtgtaaatttattctatacttttgtatatcatagtaatctactcaagattattttacaaggagtgattatcataattacttatttagaatcttttaagtcgttgtatcacaaggcattttacaagtttgtattatcggtattaagcttgccaatatttttatatgcagtgataaagtttttcttttctgctaagagaaaaaatttttacgctaataattctgaaatttcagaaattgaacaggcgttacatcaaaaatataaatatttatcgcagcaaaagtcatccacacaaatacataaagaagcattaaaaatattcaaggcacaaagttctaatacgagttcaaagaatattgaacaagcacatttttcaacatactttgaaaatgtattatttcataagttcatcatgatcaaagtgatattggccttgccgatgttcatcttattgactttttatttacagccattagttagatatatttttgaacgaattgtcatggctgtgattgtcatcattggtgttattgtcagtgtgtttaccattctgtatttttcaccgcttgatgcggcttatagcatactgggacaaaatgcaacaaaggcacagatacatcaattcaatgtattacatcatcttaacgaaccttattttattcaattgtgggataccatcaagggtgtttttacctttgacttaggtacgacttacaaagggaatgaggttgtgactaaagcagttggcgaaagaattccaattacaataattgtcgcagtattagcgctaattgtggcattaattattgcaataccaattggtattatcagtgcgatgaagcgaaatagttggcttgatatcacgttaatgataattgcattaattggtttatctattccaagtttctggcaagggctattattcattttagcgttctcattgaaattggatattttgccaccatcttatatgccagaacatccaatatcgttgattttacctgtacttgtcattggaacaagtattgctgcttctatcacgcgtatgacaaggtcttctgtacttgaagtaatgcgcagcgattatgttttaactgcttatgcaaaaggattatcgacgacacaagttgttattaaacatattttgaaaaatgccattattccaattgtaacgttagttggtcttctagtggcagagttactaggcggttcagcagtgacggaacaagtatttaacattaatggtatcgggcgttatatcgtccaaaaacaactaatacctgatatcccagcagtcatgggtggggtcgtatatatatcaattgtaatatctttagcaaacttaattattgatatattttatgctttaatcgatccaaaattacgtagtgaaattaacgaaaggaagtgaggcatatggtaaaacttacaacaaagatagcttccttaaaactattcgcaagttatgctatagcaacttatattttagttatattaacgagtgcattaaatctttttaaaggttatgtggccgatacgttctatattgctgaaacattgctaatcgttttaaccatcattttaattatcattttaacaacagaacaaacatggaagcatcatgacttatggcgacgtatcgtcgaagtgttgttattgttgatgacattaacaggcaacgtatttacattattaatgtttgtaagtattagacgttaccaacgtacatcgcaaatacatagttataacgggtgggaatcgtttatacgaaaaactactagacatcgtattgcgattatcgggttacttattttagtctacatgctgacattatcaattgtgtcacaatttacatttgatacgacattggctactaaaaatcagttcaatgcactgttacatggaccgagtctagcctatccgtttggtactgatgatttcggtagagacttatttacacgcgtagttgtcggaacgaaactgacattttcaatttcaattatttcagtagttattgcagttatttttggtgtgttactaggcactatcgcaggttattttaatcatattgataatttaataatgcgaattttagatgtagtgtttgcaattccatcattattgttagcggtggcaattattgcatcatttggagcaagtattccaaatttaattattgctttaagtatcggtaatataccatcatttgcacggacaatgcgtgccagtgttttagaaattaaacgcatggaatatgtagatgcagcacgtatcactggtgaaaacacttggaatatcatatggcgttatattttaccgaatgcgattgcgcctatgattgtacgtttttcattaaatataggtgtggttgtattaacaacaagtagtttaagtttcctaggacttggtgttgcacctgatgtagctgaatggggcaacattttacgtaccggtagtaactacttggaaacgcacagtaatttagctattgtacctggtgtttgtattatgttcgtcgttttagcatttaattttataggtgatgcagtgcgtgatgcactagatccaagaattcattaaaaaggtagggatagatgtgaagaaaatcattagtatcgcaattatagttttagcgttggtattaagtggttgtggtgtccctacgaaatcagaagtggctcaaaagtcatcgaaagttgaagtgaaaggcgagcgaccaacaatacatttcctaggacaagcaagttatgaaaatgatatgaatatcgttaaagatcaattggaaaatgcaggatttaacgtgaagatgaatatccaaccagattatggtagctatcgtacacaacgtcaagccggcaattatgatatccaaattgatgactggatgacagtgtttggtgacccgaactatgctatgacggcattatttagttctacaggatcaaatagtttattgaaagataaacatgtagaccagttgttaaataaagcttctactcaaaatgaagcagatgttaaacaaacatataagcaaattgaagatgaagttgtatttgataaagggtatatggcgcctttatatggatcaaaaaagaatttagtatatgacaataaagtgttagataaaaatagtgttggattgccaaattcacgtgcattaatatggcaacaatttgattacaacaatagtagagaacgagatacgcggccacttgtgatgacacaacaagatggtgaaattcctacattggatccaatacgttcaattgcgccgtcagtatattcaattaatatgaatatgtacacaaggttattattattagatgaaaatgatcatttaacaacgaaaggttcgttaagtcatgattatgctgtgaataaggacaataaagcattttatttcttgttaagagatgatgattattttgcgaaagtggtcaatggacaagcacgtaatactggagagcgtgtatcggctgaagatgttaagttttctttagatagagcacgtgataaaaagtctgtgcctaacaataatacttacaatatgcacaaacatataaatgacatcaagatattaaaagatgaggacatcgatcagttgcgtaaagagaaagacaaggacgataaatcaatctatgataagttgattaaagcttataacgtcaaatcgttaacgacagatggtcaaaaagtaaataataaagacggtatttatcaaattgttaaaattacgacagatcaatcgatgcctcgagaggtaaattacttaacacactcttcggcaggcattttatctaaaaaatttgttaatcaagtaaatcaagaatatccaaaaggatatggggatagcagtacaattcctgcaaattcagattggaaaaatgcgctgtatgcaagtggcgcatacattatgacacagaaaaatgcatatcaagcaacgtttcaacgtaatccaggattcaacgaaacagaaaaaggtagttatggaccagctaaaattaaaaatattacattgaagtttaatggtgacccgaataatgcattgtcagaacttagaaatcattcaattgatatgttggcagatgtgaatcaaaaacattttgatttaattaagtcggataaaaatttaagcattattcgcaaaaatggacgcaagtcagtctttttaatgctaaatattaaaaaaggtatatttatgacgcatccaaacttgagacaagcagtagttaatgcgatagatcaggatcaatttattaagttttatcgtggcgataaatttaaaattgcatcaccgattacaccacttgtcgatactggtaacgagcaacgtcaagatttagaaaaagtagaaaaagccatcaatcaataatgttttaaatatttaacagaaagtaggaggatatagtatggtcattaacttaaatgacaaacagacaaaaacatctaaagaagggttaatttccgtatcacatcctcttgcggctaaaattggtaaggatgtattagatcaaggtggcaacgccatggatgcagtgattgcaattcaactggcattgaatgtggtagaaccatttgcatcaggtattggtggtggcgggtatttgctatattatgagcaaagtactggcagtataactgcgtttgatgcgcgtgagacagcccctgcacatgtagataaacaattttatctagatgattcaggcgaatataaatcattttttgatatgactacacatggtaaaactgtcgctgtgccagcaattccaaagctgtttgattatattcacaagcgttatgctaagttgtcattggaagatttaattaatcctgcaattgaactagctattgaaggtcatgcagccaattgggctactgaaaaatattcgcgccagcaacacgcacgattgacaaagtattatgaaacggcacaagtatttacgcatgaaaatcaatattggcgtgaaggtgattggattgtacaacccgaattaggtaagacatttcaaatattaagagaacaagggtttaatgcattttataaaggtgacattgcgaaacaattagtcaatgttgtcaaagcatgtggtgggacaatcactttagaggatctagccaaatatgacattcagattaaagcgccaatcagtgcaacatttaaagactatgacatttattcaatgggaccatctagttctggcggtatcacggtaattcaaatattgaagttattagaacatgtcgatttaccatctatgggtccaagatctgtcgattacttgcatcatttgatacaagcgatgcatttagcatatagtgatcgcgcgcaatacttggcggatgataattttcatgaggtgcctgtacagtcattaattgatgacgattatttaaaagcacgcagtacgctcattgatagcaataaagcaaatattgatatagagcatggtgttgtgtctgattgcattagtcatacagatgttgaagaaaatcataccgaaacaactcatttttgtgtgattgataaggaaggtaatattgcttcatttacgacatcaatcggtatgatttacggatcgggtattacgattccagggtacggcgtgttattgaataccacaatggatggttttgatgtagtagatggtggtattaacgaaattgcaccatataaacgaccactaagtaacatggctccaacgattgtgatgcatcacgggaagccgatattaacagtaggtgcacctggtgccataagtatcattgctagtgttgcgcaaacattaatcaatgtattagtgtttggcatggatattcagcaggctatagatgaacctagaatttatagtagccatcctaatcgcattgaatgggagcctcaattttcacaatctacaatattagcattgattgcacgtggacatgcaatggaacataaaccagatgcctatattggagatgtacatgggttacaggttgacttgaatacacgtgacgcgtcgggaggtgctgatgatacgagggaaggcacagtgataggtggcgatgtattatcaattagaaaacaaccattacctagtccgaaaatatacgataatgacacccatcgagtatatttcaatgatatgcagttgccattatatgctgaacaagtgcggtggatgcatgacaaatattgggttgatgaaagtgttattagaatcattttccctgaagttagtgtgcatattgaagatttaagaagttatgaaatcgccggaaaaaattatatagatattgcctggttggcacggaagaaaggttatcaagttaccttaaaggatgacagtttatacttaactgatgaaacatatcattcagtgaaagcaaacacaaatgcatactatagatatgatcgagatagtatcacaagataatttatgtatttgatatatagtttgaagtggattttgatttttgttgaacgaaagggttcgatttcaaactttagagtgatgcttgagtgtagtaatgttgaagttgttataagaaacgctagtcgcctttgtaaaatataaaacgccccacaaattcgtttttgatgtacaccacaatagttagtctaaaatctaacttgatgtgattcggtacaattaaatgaatgatgtgaggcgtttttataatgtgtgattttaataaatgatttggttatttctataattacatcataagtattaatgttcacttaatttattataagtaaggctttctttgtatataatttggtcttttccaggacttgaaaaataaaaataaagtttctgatcttgatgattattgccttttaaatcactcattccctttaattccacctttgttgatgcatttctgggaatattatatctacgttttaattgtttaacgtttggattatcattcgacaacttaccagataaattataataatcagtggtaggatcatgtgtgactttcaaatcattgctatttaaaatgcttgttaaatcaccactttgaatcaaaaattgattgttttcgattttttgtttcagcgcgggatcttttacgtcttttgtgaaaacgattttattattaactacttttactggataacttttgtatgtcgagtcagtagcattttttctatcgtttgtagttgtgtcatattcaccagttattttatgtgtgttcttatctacctttaacaacatacggtcttcttttaaaagctcatctgatccaacaactgaataagaggattctatataccatgtgtcttgatcattattttcataatggggattatcgtgaccatcaatttcataaagcgtttctaagtttttaataggatacgtacttagtacttttttaagaccatctttcaaatgaatttgttcccacttcattgccaaaaacataccgccactgactacaattgaaataataataattgctgctaagtttaaccagaaaattttatgtgctttcatacattcccaccgtttctcaaaatacttcattaacactataataatatattttgaaaaatatttacatcagtattaaagtgaatatcaaattttaaatttatgaaaataatagatatttataaaaagcggaaaagagatacaataaaaaactgcatgacgttgaggagtcacacagtgtaattaaaaatttaaaatgtagttgctaatttttcagcattattaatactagttgctttaatttcttcagtcttatgaggttcagcattgtgtccttcaataatgattgtttcatatgatggcacacctaagaatgtcataattgttcttaaataacggtcacccatttcaaaatcagcagcaggtccttcagtataatatccaccacgtgattgaatgtgtaatacttttttgtcagttaacaaaccttgaggtccttcagcagaatatttaaaagttttacctgcaattgaaatagcatcaatatatgctttaactacaggtgggaaagaaaggttccacataggcgttacaaatacatatttatctgcacttaaaaattcttctaaaatgtcactcaatcttgaaactttcatttgttcatcatcagttaacgtttcgccattactcatttttccccaaccagttaatacatctttgtcaataactggaatataagtttcaaataaatcaatatgtttcacttcatcatcaggatgttgttgttgatatgtttcgataaatgctttaccagccgccatagaatttgataccagttcattaaaagggtgtgctgtaatatataatacttttgccatttgaaaattctcctctgtttctgttattttcttgagtataattattatattagatataaaatttgatatcaataaaaatattcaaattaccatcattttcttcatctatatttggcagtactactaaagtatgagtgcatttaattatgaaatagttgatttagaatatatacttaatacccaaaatatatgaaggatggatgccactatgacaaagcgaccaaaacgtattttggcaacaattatcatttttctttcactattatttacgattatttatatagatgacattcaaaaatggtttaaccaatataccgataaattgacacaaaatcataaaggacaaggacactcaaaatgggaagacttttttagagggagtcggattactgagacttttggtaaatatcaacattcaccatttgatggtaagcattatggcattgattttgcattgccaaaaggtacaccaattaaagcgccgacgaatggtaaagtaacacgtatctttaataatgaattgggcggcaaggtattacagattgccgaagacaatggagaatatcaccagtggtatctacacttagacaaatataatgtcaaagtaggtgatcgagtcaaagcaggtgatattattgcatattcaggcaatacaggtaaacaaacgacaggcgcacatttacattttcaaagaatgaagggtggcgtaggtaatgcatatgcagaagatccaaaaccgtttatcgatcagttacctgatggggaacgtagcctatatgatttgtagttatagaagggtgcccgcagtctaaaaaattaagcaatcattgtgtgagtatgatacttacataatggttgcttttttcaatgaaaatcgtaatgctaagtcatacttgtttgatttagatattacttaaaatgtaagacaaggttgttagcattggcagtgaaatatcgcacataaaaaaacattattgtcacactagaaaatagttgtgcactatatcaattttctgtataaaagtttaattctgacagtaatgtaaacgtttacaatttatgattgacattaataatgactgaatatatgatttatgtaagtatttgtgcaaacgttttcacaaagtgtattgcacaatcaaactgtaaacaaagtatgggaggcataacatggcagaactaaagttagagcatattaaaaagacgtatgataacaacaatactgtagtgaaagattttaatctacatattactgacaaagaattcattgtatttgttggaccatcgggatgtggtaaatcaacaacattacgaatggttgctggactagagtctatcacatctggagatttttatattgatggggaacgcatgaacgatgttgaaccaaagaatagagatattgcgatggtatttcaaaactatgcattatatccacatatgactgtttttgaaaatatggcatttgggctaaagctacgtaaagtaaataaaaaagagattgaacaaaaagtcaatgaagcagctgaaatattaggattaactgagtatcttggtcgtaaaccaaaagcgttatctggtggacagcgtcaacgtgttgctttgggcagagctattgttagggatgcgaaagtctttttaatggatgaaccattatcgaatcttgatgcgaagcttcgagtacaaatgcgcacagaaatattgaaattacataagcgacttaatactacgacaatttatgttacacatgatcaaactgaagcattgacgatggctagtcgaattgttgttttgaaagatggcgacattatgcaagtcggcacacctagagaaatatatgatgcccctaattgcatatttgtggcgcaatttatcggctcaccagcaatgaatatgttgaatgctacagttgaaatggacggattgaaggtaggagcacaccattttaaattacataataaaaaatttgaaaagttaaaagctgctggctacttagacaaggaaattattttaggtattcgagctgaagacattcatgaagaaccaatatttattcaaacttctccagagacacaatttgaatctgaagtagttgtatccgaactgttaggttcagaaatcatggtacatagtacattccaaggaatggaattgatttctaaattagattcaagaacccaagtgatgacgaacgacaagattacactagcatttgatatgaataagtgtcacttttttgatgaaaaaacaggaaatcgtatcgtctaagggggagtattcatgtctaaaattttaaaatgtatcacgttagccgtggtaatgttattaatcgtaactgcatgtggccctaatcgttcgaaagaagatattgataaagcattgaataaagataattctaaagacaagcctaaccaacttacgatgtgggtggatggcgacaagcaaatggcgttttataaaaaaattacgaatcaatatactaaaaaaaccggcatcaaagtaaagcttgtaaatattggtcaaaatgatcaactagaaaatatttcgctagacgctcctgcaggaaaaggtccagatatctttttcttagcacatgataatactggaagtgcctatctacaaggcttagctgctgaaatcaaattatcaaaagatgagttgaaaggtttcaataagcaagcacttaaagcgatgaattatgacaataagcaactagcattgccagctatcgtagaaacaaccgcacttttctataataaaaaattagtgaaaaatgcaccgcaaacgttagaagaagttgaagctaatgctgccaagctaactgatagtaaaaagaaacaatacggtatgttatttgatgctaaaaatttctattttaattatccgtttttattcggcaatgatgattatattttcaagaaaaatggcagtgaatatgatattcatcagctaggactaaattcaaaacatgtcgtcaagaatgctgaacgattacaaaaatggtacgacaaagggtatcttcctaaggcagcaacacatgatgtcatgattggtctttttaaagaaggaaaagtaggacaatttgtcactggaccgtggaacattaatgaatatcaagaaacgtttggtaaagatttaggagtaacaacattacctacagatggtggcaaacctatgaaaccatttctcggtgtacgtggttggtatttatctgaatatagtaaacataagtattgggctaaagatttaatgctgtatatcactagtaaagatacattacaaaaatatacagatgaaatgagcgaaattactggacgtgttgacgtgaaatcatctaatccaaatttaaaagtgtttgaaaagcaagcacgtcatgctgaaccgatgcctaatattcctgaaatgcgacaagtttgggagccaatgggcaatgcaagcatatttatctcaaatggtaagaatcctaaacaagcgttagatgaggcgacgaatgatataacgcaaaatattaagattcttcatccgtcacaaaatgataagaaaggagattagttatgacgaaacgtaaccctaaattagcggcattattatctgttatacctggtttgggacagttttataataaaagacccattaaagggacgatattttttatctttttcatcagttttatttctgtattttatagctttttaaatattggtttttggggattgttcacattagggacagtacctaagttagacgattctcgtgtcttacttgcacaaggtattatttctatcttactcgttgcttttgcaatcatgctatatgtcattaatattttagatgcatatcgtaatgctgaacgatttaatcgcaatgaggaaataaaggatccgaaggcacgtatggttgcaacatgggacaagacgttcccatacttattaatctcaccaggtacattcttattgatatttgtagttgtatttccattaatatttatgtttggagtagcatttacaaattacaatttatacaacgcgcctccgagacacacattagaatgggttggtttagataactttaaaacgttattcacaattggcgtttggcgtaaaacatttttcagtgttattacttggacattagtatggacgcttgttgcaacgacacttcaaattgcattagggctgtttttggcaattattgtaaatcaccctgtcgtcaaaggtaagaaatttatccgtactgtgttaatcctaccttgggctgtaccatcatttgtgacaattttaatatttgtagcgttatttaatgatgaatttggtgcgataaataatgatattttgcaacctttattaggtgtagcaccagcatggttaagtgatccgttttgggcaaaagtggcattaatcggcattcaagtatggcttggattcccatttgtctttgcactgttcactggagtactgcaaagtatttcatcagattggtacgaagcagcagatatggatggtgcgtctagttggcaaaagtttagaaacatcacattcccgcatgtcatttacgccacagcgccattgttaattatgcaatatgcaggtaatttcaataattttaatcttatttatctatttaataaaggcggtccaccagtgtcaggacagaatgctggtagtacagatatcttgatatcttgggtgtataatctgacatttgagtttaacaacttcaacatgggtgcagttgtgtcattaattattggatttattgttgctattgtcgcatttattcaattcagacgtacaagtacgtttaaagatgagggaggtttataagatgacaaagaagaaaaacatattaaaagcaatcggtatttacagttttatagcgatgatgtttgtcatcattttatatccactactgtggacatttggcatttcccttaatccaggtacgaacttgtatggtgccaaaatgataccagacaatgcaacatttaaaaattatgcattcttactattcgatgacagtagtcaatacctgacttggtataaaaatacgcttatcgtagcatctgcaaatgcactgtttagtgtgatatttgtcacgttaacagcatatgctttttctagatatcgctttgttggtcgtaaatacgggctgattacatttttgattttacaaatgttccctgtattaatggcaatggtcgcaatctatattttgctaaatacaattggattattagattctttatttggactaacactggtatatattggtggatcaataccgatgaatgcctttttagtgaaaggttacttcgatacgattccaaaagaacttgatgaatctgccaaaattgatggtgcagggcatatgcgtattttcttacaaattatgcttccattagctaagccgattttagcagttgttgctttgttcaattttatggggccatttatggactttatattacctaaaatactattaagaagtcctgaaaaattcacattagcagttggattgttcaactttattaatgataagtatgcaaataatttcacagtgtttgcagcaggggcaattatgattgcagtacctatagcaatcgtattcttgttcttgcaacgctatttagtatcaggtttaacaacaggtgcgacaaaaggttagtttgaaattaggagtggggcagaattgataaagaaccactaatgacgataaagattaaaaggaggacgttatgatgacgattaaagttggaatcattgggtgtggtggtattgcgaatggcaagcacatgccaagtttacaaaaagttgaaaatgttgaaatgatcgcattttgtgacgtagacatttcgaaagcagcgagtgcggcagaagcatacggaactgacaatgcaaaggtttatgatgattacaaagcattgttaaaagatgacacgattgatgttatccatgtttgtacgccaaatgactcgcattgtgaaattactgtagcagggttgcatgccggtaaacatgtgatgtgtgaaaaaccaatggctaaaacgacagcagaagctcaaaaaatgatagatacagctaaatcaacaggtaaaaaattaacaataggttatcaaaatcgcttcagaccagatagtcaatttttatataaatcagcgcaacgtggcgacttaggagacatttacttcggaaaggcacatgccattcgtcgtcgagcagtaccaacatggggtgtctttctagacgaagaagctcaaggtggaggaccattaatcgatatcggtacacacgctttagatttaacgttatggatgatggataattatgagccagaatcagtgatgggttcaacattccataaattaaataaacagcatcatgcggcaaacgcttggggttcatggaatccagatgaatttacagttgaagattctgcgtttggatttattaaaatgaagaatggagcgacgatcattttagaatccgcttgggcgattaattctttagaagtggatgaggcaaaatgttcattatcaggaactaaagcaggtgctgatatgaaagatggtctacgtattcatggtgaagacatgggtacactttataccaaacacgttgaattggaaaacaaaggcgtcgacttttatgaaggtaatgaagtggatgaagctgaagaagaagcaaaagcttggattgatgcagttgtaaatgatactgaaccagttgtgaaaccggaacaagcaatggtagttacaaaaattcttgaagcgatttatcagtctgcaaaatcaggcaaagcaatttactttgaataacatcatacggtaaggaggcacatcatgacaaaattaaaagttggtgtgataggtgttggtggcattgcacaagaccgtcatattccagcattgctgaaactcaaagacacagtctcattagttgcagtacaagatattaatacagttcagatgattgatgttgcgaagcgctttaatatacctcaggcagttgagacacctagcgagctgtttaaacttgttgatgcggtggtcatttgtacacccaataaattccatgctgatctttctatagaagcattgaaccatggtgtccatgtcttatgcgaaaagccaatggcaatgacgacggaagagtgtgatcgcatgattgaagcggctaataaaaatcacaaattattaactatcgcttatcattatcgtcacacagatgtcgctatgactgctaaaaaagcaattgaagcaggtgtggttggtaaacctttagtagcacgtgtacaagcgatgcgtaggcgtaaagtacctgggtggggtgtttttaccaataaagcgttgcaaggtggcggtagtttaatcgattatggttgccacttgttagacttatctttgtggctattaggtaaagatatggtgccgcatgaagtgctaggaaaaacatataatcaattgagtaaacaaccgaatcaaattaatgattggggaacatttgatcatactaaatttgatgtcgatgatcatgttactagttatatgacatttgccaatcgagcaagcatgcagtttgaatgttcgtggtctgcaaatataaaggaagataaggtgcacgttagtttatcaggcgaagatggcggtatcaatttatttccatttgaaatatatgagccccgctttggaactatttttgaaagcaaagctaatgttgagcataacgaagacattgctggtgagagacaggcgcgtaactttgtcaatgcgtgtttagggatagaagagattgtggtgaaaccggaagaagcacgcaatgtaaatgcccttatagaagcgatttatcgtagcgatcttgataacaagagcatacaactttaatgattattatatataatacaaaattctcaatataaaaagaaggagtgcttttcaatgaaaataggtgtattttcagtattattttacgataaaaattttgaagatatgttagattatgtcgcagaatctggattggatatgattgaagttggaacaggtggtaacccaggagataaattttgtaagttagatgagttgttagaaaatgaagacaagcgccaagcatttatgaagtcaatcacagacagaggcttacaaataagtggtttcagttgtcataacaatccaatttctccagatccgacagaagcgaaagaagccgatgaaacgttacgtaaaacaatccgtttagcaaatctattagacgtgccagttgttaatacattttctggcattgcaggatcagatgataccgctaaaaagcctaattggcctgttacaccttggccaacagcctactctgaaatttatgattatcagtggaatgaaaagttgataccatattggcaagatttagctgagtttgcaaaagagcaagatgtaaaaattgccatagagttgcatgcaggatttttagttcatacaccatatacgatgttgaagttacgtgaagctacaaatgaatatatcggtgctaacttagatcctagtcatttatggtggcaaggtattgacccaattgctgcgattcgcatattaggccaagcaaatgcaattcatcacttccatgctaaagatacgtatattaatcaagaaaatgtaaatatgtatggtctaactgatatgcaaccatatggtaacgttgcaacaagagcatggacattccgtacagttggttatggacatagtccatatgtatgggcagatatcataagtcaacttattattaatggatatgattatgtattaagtattgaacatgaagatcctattatgtcagtagaagaaggtttccaaaaagcttgtcaaactttgaaatctgttaatatttacgacaagccagcagacatgtggtgggcataatacgaacgcgaggttagtctgaagtttgtctgaagtaagactggtggcagtgttgaataaatgcatatgtcgccaagccattgccaaaaatttcacaccttaaatcaagttcattgtttgtaaagaaggtgtactttatataagtatatagcgatggtcatacccattcacagtaacaatccgaatcattgaaaagagtatataagcttttcaatagtgaggtatatgataataaaaaagcctgttgtcacaatggtcatagacacgacatactttaaaggtttctgaatataatatttcagaacgcactttaaagatggacgtcgatgtcgactaatgtgatgacaggctttcatctttttaaatattcattaatttctcttcttgtttaatacgtacatataagaaatacgcatacggtactaataaaatagttgtatatgttgcgtgtgttaataataatacaccgattaattcaggaatgatgtttaagaagtaatttgggtgttttgtaattttatataatccagatttaataataggatggttaggtaaaatgaataattttaatgtccaaataccacctaaagttttaataaccataaataacatgatataagcaaagattaatataactaagccaataccatttgcaaagctaaatgtatctttattaataaatgcctctacaccagccaatacataaattaaaacgtgtgttattgctaaaaacttcgaatttttaacgccatattcaactgcaccgtctgcttttaattgttttgagtgattaatagatatctttaagctgacaagtctgatacagaaaaagataagtaatatagataaaatcatgatgtcctccgtcattatgtcatatgtataagcgttgattttgacaacataaagtattttatagataaaacttgtcaaatactattaactatttattaattttagtacataaatatgtttctaagtatgtgtttatgttcagtattttggataatttaataattttaaggatattaagcgcttacaccgacgtgatatatttggcttaacgaaaatgattgaggtgacagagatgaacttttttgatatccataagattccgaacaaaggcattccattatcggtacaacgtaaattatggcttagaaactttatgcaagctttctttgtagtgttctttgtttatatggctatgtatttaattcgaaacaactttaaggcggcacaaccgtttttaaaagaggaaattggattatctacattagaacttggttatatcggattagcatttagtatcacgtacggtttaggaaaaacattacttggatattttgtcgatggacgtaacacaaaacgtattatctcattcttacttatcttatctgcgattacagttttaattatgggatttgtgttaagttactttggttctgtaatgggattattaattgtactttggggacttaacggggtgttccaatcagttggtggacctgcaagttattcaacgatttcaagatgggcgccaagaacgaaacgtggccgatacttaggattttggaatacatcacataatatcggtggtgccatagcaggtggtgttgcactttggggtgctaatgtattcttccatggaaatgttatagggatgttcattttcccatcggtgattgcattacttattggtatcgcaacattatttatcggaaaagatgatccggaagaattaggatggaatcgtgctgaagaaatttgggaagagccggttgataaagaaaatattgattctcaaggtatgacgaaatgggagatctttaaaaaatatatcctgggaaatcctgttatatggattctatgtgtttcaaacgtctttgtatacattgtacgaatcggtattgataactgggcaccgttatatgtgtcagagcatttacactttagtaaaggcgatgcagttaatacgatattctactttgaaattggtgctttagttgcaagtttattatggggctacgtatcagacttattaaaaggtcgtcgtgcaattgtagctattggctgtatgtttatgattacatttgttgtcttattctacacaaatgctacaagtgtcatgatggttaacatttcattgtttgcattaggtgcgttaatctttggtccgcaattattaattggtgtatcattgactggttttgttcctaaaaatgccatcagtgtagcaaacggaatgacaggttcattcgcgtatctattcggtgactcaatggcgaaagttggtttggcggctattgctgatccaacacgtaacggtttaaacatctttggatatacattaagtggatggacagatgttttcatcgtcttctatgttgcattattcctaggcatgattctattaggaatcgttgctttctatgaagaaaagaaaattagaagtttaaaaatttaatataaatcggattaaaagtatcgccaatctattgcaatatagttggcaatcctgccccgacggcatgtgcgtgaagagatgaaagatactgcttctacccttgcaaatatatcatctctatgtctcggggcagatcataattccctgttatgaagtatccttatttgcccgacttagggtgactcaatgaatttactccttacaataaagacatatagcggtgtcaatattgtagggagtattgttttatatttaaactctctaaaaagcggactgaaagaaaagtgaaaacttctctatcagtccgctttttcatagaacaaaatgtaggcgccataatcattagttatttgctaatctattttgcttgcttacaataatcacttggcgacatttgtaaatattttttaaaatgatagctaaacattttatactctgaaaagcctactttgtctgcaatttcatagtgtttgtaatgtcgatctaacaattgcagagattgtaaaatacgatagcgatttaaataatcgacaattgtaataccaacatgatctttaaatgttcgcatcgcatacgattcactaacatcgatatgttgaattaaatctgaaacagtcactttcgtttgataagattgcttaatttgatcaacaatctggtttacataataatcatcgtattctacttttaatagtggttggaaggcatcatgacaagatgctaagctacggccgttctgtgattgttgctctaataaggtacggacaagtcttcctaaaataacttctaattgtgcatggtctactggttttaataaataatcaagaacatgatgttgaatgccggctttcatatattcaaagtcatcgtaactcgataatatgatgacattacaatctagatgcgcaatatcattgagtaaatcgacgccatttttacgtggcatacgaatatcagtaattactaattctggctgatgttgttgaattagtgataatgcttcaacaccatctttagcagtgtatattgtattgaaatgatagtctccccaaggaatgatttgctttaatccttctcgaataattcgttcatcatcacaaataactaccttaaacatctacattcccccttgaaagtggtattttataacaaattaacgtaccttgattacgctttgaaaaaatatgaagtcgtgcatgtgaaccatattgaatcattgctttattgtgtaaatgatttaatcccaaatgcttagtatcaaatacatcattattaagagattggcgtacatattgcaggcgagatgacgacatcccgataccattgtcgcaaactaaaacatgtaaattctgacgtgccaatgtcaggcgtatagtaatgtccaatgactcagtatctctaccatgtttaatagcattttctatgagtggctgaagcatcattttaccaattgtctggtgacgcgcttcttcagaactttcgatatggagcttaatcatgtcatcaaaacggatgttttgtatcgcaacatactgttcaatgtagttcaactcttcgtttaattccactgtatgtgagtttgtacgtaatgagtaacgtaacatttgcgataattgttggaccacagtttgtgctaatttaggagataacgtaattaaatattgtattgtttgcatcgtattgaataggaaatgaggttggaattggcgctctatttcctttaactgaatatcacgcaagcgacgttctgtatgctcgatagaatggattagttgctcatttgattcaaataaatcgtaaatataattattaatttcttctagttcactgttgttttttaaaggcgtatatgtacctagatgacgatttttggcatagtaaattttttgaataatcgtttcgatatcttttgtttgtcgtttagccatattatctgcgctaatgaaaccaaatattactagtaaaacaagaactacggccataacaattaacaacgtgataccatcttcaatgttttcatgtatatctttataaataatgagacgatggtcagcatggtttaattttacagattcattcataaatccgaattgttgcggtctatacttttcacctatagtaaaacggtcatcgttggcgtataaaatattgtcatattgatcaacgataagtgcgaattgtcggctatctttcttaatttcacttaaacgtggggtgttagccatataaattttaagcatatatgtactattattgaatttaagctgatgcgttgaaaataaatacatatttttagtgtttaaatgttcataattattggttataaactgatttggtccagataattcataataaagtgttgcgggctgttggtgtattaattttaataattcacgttttgtagcggtaacatcatgatgatttgttaaatcgagctcttgaaacgaattattatgctgtgtaataaatgtctgaatctgcttttcagtgtgatgtaaagatgactgactttcatcaacatgttgatgaatcgtacgatgctcaatccaaatatagatggcatagaagcttactagtccaataataatgactaaaaatactggaaaaatagtagacgcaaataacgatcgtctcaattgatgtctataaggtttgtatgccgtcattgaatcatcttcaaaaatttatgatgtggaatgtccggtaatttagatttcggtattaaaggtatgttcttaagattttcgatagactgatcgctttgttcactaacatcctttcgaattgacttggcatcgaactctgcaactaatcgttgttgtactgagcggcttgttaaatattgcactaactttttacgcttaggatgagggtgtgcatttttaactaaagcaataccatcaacatttaacattgttccttcaattggataaacgattgatacaggataacctttgtttttccatgtgcgtgcatcttgttcgtagcttagacctgcgtaatatttaccttttgcaacatcttcaatgactttagacgtctttgacagttgcatcgcatggttttggaattgatgcacatcacttactcgatgatgcatgctataaatagcgcgcatatgttgatagcctgtcgttgttgtatttggatttgagtacgcaattttacctttaagtataggttgtaataaatcttgataacctcgaatcttaatatctccttgtaaatctgaattcactactataactgttggcattaatagaaaactagtaacatatttattgttcgagcgataatcctctaattgctgtgttacagatgtatcttgatagggaacaaaatcttctggatgatcaattgtttctgataacacaccacccataaagacgtcaccacgctccgaaaaatcttcgttatgcaagtttgaaagcagtacttgagtagatccatgtttgatttcaattttgacatgctcttgtttttcaaattcatttaaaattggacgaatcaagtttgattgatacggagaataaactgttaatacatttttatctgattcagagtgacgcgtattagcgcatgctgataaaaaaatgagaaataatagcaagatataaatttttgatttcatgatatcccatcaattctatgtatattttaatacaataattttagcaataaatgacgcataagtaatgttaaatatttagaaatgtttaaagatgacttgttaagacgttgcaaatgttgtgatagcacataatttttgtttgtcaagatgacttaccgaggttgtaaaatcaaactgttatattttatttgtagctgttatataaaaattggcaagatattgaacggttcaaaagtatatttttacgtcaataaaagtatttaatccagtctcttcatatataaaagtaaatctttctaagtgttgatttaacgcttatcaacaatcattttttataaacaaatatatactcctaaattaacttttaaagcaatgaaaatagtgaacattataactgttgtgtaacagaatgcaattagcatattactgttacacaaattagtacagtttctatgttttgacatacatttgatgaaaattgtacataatttatgtgaaaaaaatcacaacaaacatgctacaatgactatgaaaacgttaacatagcatttcaaattcacaacattatacagatggaggcgtttagtatgttagaaacaaataaaaatcatgcaacagcttggcaaggatttaaaaatggaagatggaacagacacgtagatgtaagagagtttatccaattaaactacactctttatgaaggtaatgattcatttttagcaggaccaacagaagcaacttctaaactttgggaacaagtaatgcagttatcgaaagaagaacgtgaacgtggcggcatgtgggatatggacacgaaagtagcttcaacaatcacatctcatgatgctggttatttagacaaagatttagaaacaattgtaggtgtacaaactgaaaagccattcaaacgttcaatgcaaccattcggtggtattcgtatggcgaaagcagcttgtgaagcttacggttacgaattagacgaagaaactgaaaaaatctttacagattatcgtaaaacacataaccaaggtgtattcgatgcatattctagagaaatgttgaactgccgtaaagcaggtgtaatcactggtttacctgatgcatacggacgtggacgtattatcggtgactatcgtcgtgtagctttatatggtgtagatttcttaatggaagaaaaaatgcacgacttcaacacgatgtctacagaaatgtcagaagatgtaattcgtttacgtgaagaattatcagaacaatatcgtgcattaaaagaattaaaagaacttggacaaaaatatggtttcgatttaagccgtccagcagaaaacttcaaagaagcagttcaatggttatacttagcataccttgctgcaattaaagaacaaaacggtgcagcaatgagtttaggtcgtacatcaacattcttagatatctatgctgaacgtgaccttaaagcaggcgttattactgaaagcgaagttcaagaaattattgaccacttcatcatgaaattacgtattgttaaatttgctcgtacacctgattacaatgaattattctctggagacccaacttgggtaactgaatctatcggtggtgtaggtattgacggacgtccacttgttacgaaaaactcattccgtttcttacactcattagataacttaggtccagcaccagaaccaaacttaacagtattatggtcagtacgtttacctgacaacttcaaaacatactgtgcaaaaatgagtattaaaacaagttctattcaatatgaaaatgatgacattatgcgtgaaagctatggcgatgactatggtatcgcatgttgtgtatcagcgatgacaattggtaaacaaatgcaattcttcggtgcacgtgcgaacttagctaaaacattactttacgctatcaatggtggtaaagatgaaaaatctggtgcacaagttggtccaaacttcgaaggtattaacagcgaagtattagaatatgacgaagtattcaagaaatttgatcaaatgatggattggctagcaggtgtttacattaactcattaaatgttattcactacatgcacgataaatacagctatgaacgtattgaaatggcattacatgatacagaaattgtacgtacaatggcaacaggtatcgctggtttatcagtagcagctgactcattatctgcaattaaatatgcacaagttaaaccaattcgtaacgaagaaggtcttgtagtagactttgaaatcgaaggcgacttccctaaatacggtaacaatgacgaccgtgtagatgatatcgcagttgatttagtagaacgcttcatgactaaattacgtagtcataaaacatatcgtgattcagaacatacaatgagtgtattaacaattacttcaaacgttgtatacggtaagaaaactggtaacacaccagacggacgtaaagctggcgaaccatttgcaccaggtgcaaacccaatgcatggccgtgaccaaaaaggtgcattatcttcattaagttctgtagctaagatcccttacgattgctgtaaagatggtatttcaaatacattcagtatcgtaccaaaatcattaggtaaagaaccagaagatcaaaaccgtaacttaactagtatgttagatggttacgcaatgcaatgtggtcaccacttaaatattaacgtatttaaccgtgaaacattaatagatgcaatggaacatccagaagaatatccacagttaacaatccgtgtatctggttacgctgttaacttcattaaattaacacgtgaacaacaattagatgtaatttctcgtacattccatgaaagtatgtaacaaaatttaaggtgggagcactatgcttaagggacacttacattctgtcgaaagtttaggtactgtcgatggaccgggattaagatatatattatttacacaaggatgcttacttagatgcttgtattgccataatccagatacttggaaaattagtgagccatcaagagaagtcacagttgatgaaatggtgaatgaaatattaccatacaaaccatactttgatgcatcgggtggcggtgtaacagtcagtggtggcgaaccattgttacaaatgccattcttagaaaaattatttgcagaattaaaagaaaatggtgtgcacacttgcttagacacatcggctggatgtgctaatgatacaaaagcatttcaaaggcattttgaagaattacaaaaacatacagacttgatattattagatataaaacatattgataatgacaaacatattagattgacaggaaagcctaatacacacatccttaacttcgcgcgcaaactgtcagatatgaaacaacctgtatggattcgacatgtccttgtgcctggttattctgatgataaagacgatttaattaaactaggggaatttattaattctcttgataacgtcgaaaagtttgaaattctgccatatcatcagttaggtgttcataagtggaaaacattgggcattgcatatgaattagaagatgtcgaagcgcccgatgatgaagctgttaaagcagcctaccgttatgttaacttcaaagggaaaattcccgttgaattataaatacaattcagaccgaaaagaaagcatatgcaacttcaagagtgaaggggcatatgcttctttttcaattgagtattgagtattagcaagacgtagtaggtatatgagacaacttctacaatggttgaaggaagacgtttttgtaagtagctatgctgataaagaatgtgatgtcttgttaaaggtgaggttccaatatcatcgaatgggttattatttgctacttgcatatgaatatgagtcttttcaaatttttattgaccctgagtaatgaaaaatattaagatgaaacttaatattaaagcaatgcggagcgtgattatgaagagaattagtaaagatatatgggcagtatttaaattactgtatcaaaataaagggcgttttagcattaatgccttactattgcagttaatcatgatttttattagtagtacatacttaattttactatttaatatgatgttaaaagtagctgggcaaagccaacttacgattaacaattggacggaaatcataagtcatcctgccagtgtgatacttcttattatattcatattaagtgttgcttttctgatttatgtagagttttcattgttagtttatatggtttatgccggctttgatcgacagattattacatttaaatccatttttaaaaatgcctttgtaaatgtgcgtaaactcataggtgtaccagttattttctttgtcatttatttaatgttaatgatacccattgccaacctaggactaagttcagtattaacaaaaaatatttacatacctaaatttttaacggaagaacttatgaaaacgacgaaaggtataatcatttacggtacctttatgattgctgtatttatattaaactttaaattaatatttacgttaccgttaacgattttaaaccgccagtcgttatttaaaaatatgagactaagttggcaaattacgaagcgaaataagtttcgacttgttatagaaatagttatattggaactcatcattggtgcgattttaacattaattatttcaggagcaacatatcttgctatttgtgtagatgaagaaggagataagtttttagtctcatcaattttatttgttgtattgaaaagcgcattgttcttctattatttatttacgaaattatcattaatcagtgtgttagtactgcacttaaaacaagagaatgtattagaccaaccgggcttagaatttaaatacccaaaaccgaaacggaagtctaggttctttataatttcaatggtgcttgcagtgacatgttttatcggttataacatgtacttactttacaataatactatcaatacaaatatctccattattggccatcgtggtttcgaagataaaggcgttgaaaattctattccgtcattgaaagctgctgcaaaagcgaatgtcgaatacgttgagttagatacaattatgacgaaagataaacaatttgttgttagtcatgataacaatttgaaacgtttaacaggtgttaataaaaatatttctgaatctaatttcaaagatgtcgtcggtttgaaaatgcgtcaaaatggacatgaagcaaaacttgtatccttagacgaatttattgaaacggctaaacaatcaaatgtgaagctactagtagagttaaagccacatggtaaagaaccagcagattatacacaacgtgttattgatattttgaaaaagcatggtgttgaacatcaatatcgtgtgatgtctttggattatgatgtgatgactaagttgaaaaaagaagcgccatatctcaagtgtggttatatcattccgttgcagtttggtcattttaaagaaacatcattagatttctttgtcatcgaagatttttcttattcgccaagacttgttaatcaagcgcacttggaaaataaagaagtctatacttggaccattaacggcgaagaagatttaacgaaatacttacaaaccaatgttgatggtattatcacagatgacccagcattagctgatcagattaaagaagaaaagaaagacgaaacatacttcgatcgttctataagaattttgtttgaataatataaacaaagacctctaaagttatcaagatgataccttcagaggtctttttaatgttgccatctatgggataggcaatcgtttcattcgtttatattcatatgacaagtatttgtatggcaatttggcgtcacaaacacttacatgatttattggtgaattattaattgttttgtgaatgcaaagggttagaaattgaattgtaaatactttctaatctttgtttcgctttagtcatttgatccaaatttttagtgcgtatagcggattttgcaatatagtgcgcagctaaaatatcgcgtttttgaaacgcatctaaatttaggtacgataatttatttaagtcagtgtttgctattaattcatgtaattgatctacaagcgcttgatgttgatacgtatgtgatgtagtttcaggtttgcttgctaatttaataccagtcgtatcaaggagcgccgctttaataccagcaactaaatatgttttgattttcatttgtgttgtcatgctttgttactcctttgatgtacattaatcaaaaaaattatacactattgtatattgcaaagctaattaactataacaaaaagatagttaatgctttgtttattctagttaatatatagttaatgtcttttaatattttgtttctttaatgtagattgggcaattacattttggaggaattaaaaaaatatgaaaaagcaaataatttcgctaggcgcattagcagttgcatctagcttatttacatgggataacaaagcagatgcgatagtaacaaaggattataatgggaaatcacaagttaaaaaagagagtaaaaatgggacattaatagatagcagatattattgggaaaaaatagaagctctagaaaagcagttttcaagtgcattggcattaacagatgagtatcaatatggtggtaatgaatataaagaggcaaaagataaattaatggaaaggatattaggagaagatcaatatttattaaagaaaaaaatagatgaatacgattattataaaaaatggtataaagcaacttacccaaacgataattcaaaaatgtattcatttcataagtataatgtttactatttaacaatgaatgaatataatgaaatctcaaattcattaaaagacgctgtggaaaaatttaataatgaagtaagagatattcaatctaaaaatgaagacttaaagccttatgacgaaaatactgaaaaacaagaaactgataaaatatatgaatttgttagtgaaatagatacagtttttgcagcgtattatagtcatgaaaaatttggtatacatgctaaagaattacgagcaaaattagacataatactaggtgacgtgcataacccgaatagaatcactaatgaacgtataaaaaaagaaatgatggaagacttaaattcaatagtcgatgatttctttatggaaacaaatcagaatagacctacaacaataaagaaatatgaccccaatattcatgattatacaaagaaaaaagagaataaagaaaattttgataagttagttaaagaaacaagagaagcggttgcaaatgcagatgcatcttggaaaaagaaaactgtcaaaaaatacggagaaactgaaacaaaatcgccagtagtaaaagaagagaagaaagttgaagaacctcaagcacctcaagcacctcaagcacctaaagttgataaccaacaagaggttaaaactacggctggtaaagctgaagaaacaacacaaccagttgcacaacctctagttaagattccagaaggtacaattcaaggtgtaactgtagaagggccaaaatacccaacgatggaacagcacacaatctatggtgaaattgtaaaaggtccggaatatccaacgatggaaaataaaacgttacaaggtgaaatcgttcaaggtccagattttctaacaatggaacaaaacagaccatctttaagtgacaattatacacaaccatctgtgactttaccgtcaattacaggtgaaagtacaccaacgaaccctattttagaaggtcttgaaggtagctcatctaaacttgaaataaaaccacaaggtactgaatcaacgttgaaaggtactcaaggagaatcaagtgatattgaagttaaacctcaagcaactgaaacaacagaagcttctcaatatggtccgagaccgcaatttaacaaaacaccaaagtatgtgaaatatagagatgctggtacaggtatccgtgaatacaacgatggaacatttggatatgaagcgagaccaagattcaacaagccaagtgaaacaaatgcatacaacgtaacgacaaatcaagatggcacagtaacatatggcgctcgcccaacacaaaacaagccaagcaaaacaaatgcatacaacgtaacaacacatgcaaatggtcaagtatcatatggcgctcgcccgacacaaaaaaagccaagcaaaacaaatgcatacaacgtaacaacacatgcaaatggtcaagtatcatatggcgctcgcccgacacaaaaaaagccaagcgaaacaaatgcatacaacgtaacaacacatgcaaatggtcaagtatcatatggcgctcgcccgacacaaaaaaagccaagcgaaacaaacgcatataacgtaacaacacatgcagatggtactgcgacatatgggcctagagtaacaaaataaatttataactctatccaaagacatacagtcaatacaaagaattatgtatctatacaacagtaatcatgcattctatgatgcttctaactgaattaaagcatcgaacaatcggaagcatatttctaaattatttattcattatagtcttaaacataacatgacctaatatattactaacctattaaaataaaccacgcacatctaagtgatatacgacaatcacagcaataataattgctttagaaagtcgtaccgaactggaacttacaagtctagttcgaacacacactgatgtgagtggttttctttattttaaacatgaacaatcagataagttactagcattagcaaatattattaaatcaaagggcttcgattcataaaatttaaaacaatgattaaaattagacgtgtaaatgttaaattctaaaacggaaatacccaccatcccattaaaccacttttttgttcaatcactatgtttcacatagcttcattaataaaacgaaattgcttcaacccgcttcaacttcaacccgcttcaacttcagcctacttcattcaataacctaacgaatccgcttcatccaaaatcaaccattctaacgcacatactcaaatatagcagctgcacccatgccgacaccaatacacatcgtaaccatgccgtaacggctatcgggacgtctacccatttcattaagtaaacgcgcggttaacattgcccctgtagcacctaatggatgacctaaagcaatagcgccaccattcacattcgtacgtgatatatctagacctacttctttaatagatgcaatcgtttgagaagcaaatgcttcgttcaattcgatcaaatcaatgtcttcaacagatagattgctgagtgacaatacttcaggaatcgcatatgcaggcccaatacccataattttcgggtcaacgcctactgccttataaccaacgaatcgtgcaataggtgtcacgcctagttctttcactttatctccagacattaaaactacaaatcctgcaccatcagaaagtggggcagatgttcccgcagtcacagtgccgtcagctttaaatactgtacgtaatttggctaatgcctccatcgtggtgtcagggcgtataaattcatcttggtcaaagatatttgtgtgtacttttggtcctgcgtttgtatattcaactgagtttacccgtattggaataatttcatctttgaaccgaccatcacgttgtgcgtcataggcacgttgatgacttctgacagcataagcatcttgatcttcgcgtgatacgtcaaattgggatgctacattttcagcagttaaacccataggatatgacgcacctatatcatcatattgtaaggttggattgtttgtgggctcgttgccacccattggtacggcactcatcaattcaacgccaccagctacaagtatatctccttgaccagccataatttgattggctgcaatcgcgatggtttgtaatcctgatgagcagtagcgattcactgtttgacccggtaccgtgtcagataatcccgcacgcaatgcaatcgttcgtgcaatgttttgtccttgtaatccttctggaaaagccgtaccaacaatgacatcttcaatcatattcttattgaattttccgtcaatacgtttcaatacgccttgtaatactttggctgcgacatcatcaggtctttcgtggaataatgcgccttgctttgctttcgctgcggctgaacgcccataagctacaatgtatgcttcttgcatggttatcatcctctcttaatgactatcttttaattacgtaatggcttaccagtttttaacatatgtgcaattctttcatatgattttttagattttagtaagtcaataaagccaattttctccaacgattgaatgtaacgttgatttataaatgtatttcttggtaaatcaccacccgctaaaattgtggcgatatttaaggcgatatgataatcatggtcgctaataaaatgcccccgtctttgcgcatctaattgtccttggatcaatgctttgaagtcttcacctaaagcgatatattgatgtctaggattcggaatatagtttgtttctgcttcatatttcgcacgtttgagcgcaacttcgacacgttgtgctgtattgaaaataatcgtatctgtatcacgtaaataaccataacgacgtgcctcaaaggcatttgtagagactttcgcaaatgcgatattcgtcagtacttttgtcatggaagcttgtttgtcatcaaacttatgcgatgtgcgtaatatgcgatcagccatttctgcaaggccaccgccactcggtaataagccaacgcctgcttcaacaagacctatatatgtttcacttgcagcgacaacaataggtgagtaaagtacaagctcacagccaccgcctaaggcacgaccttgaacagctgtgactactggtttcaaactatacttcaaacgattaaagctataatgtaatttatcaattgattgtgcaacgacatcatctacaagaccgtcttcatgcgcctttttcattaagaaaaggttagcacccacactgaaattgttaccatctgcataaatgaccatacttgtgtaatgttcattttccagtaaatcaatggcatcaactaacgcatcgttgaattcatcggtaatgacattatttttactttgtaatttcagtaacagttgatcatcatgagttacggaaagtttggcatcacctttatcccaaagttcatcttttacgaagtgagaaataggtgttgcatattcaatggtctcatcttgtttataaaagccaccatctaaatcactaatccattgtggtaagtctccaagttcgtcttccatacgtgttttaacacgttcgtatcccattgcatcccataattggaatggaccaagtttccagttgaacccccagacaagcgcacggtctatgtctcggaaatcatcggtagctttaggtacattgatagcagagtaatagaaattattacgtaatgtctcccataaaaatagtcccgcttcgtcttgcgcattgaatatggtatcaaggttatgcactaagtctttattaaattcatttaaaattggtaattgtggttgcgatacaggtacataatcttgtttttcaacatcgtaaacaagtcgagctttagtttctttatcctttttgtaaaatccttgtttcgttttacgtccgagtgcgccattgtcaaacaacgtatttacaattttgacatcatgaaaataaggtgtttcttcaggtacttgttgcatgcctttaattacagacactgcaatatctaaaccgactaggtcagatagcgcatatgtacctgttttaggacgaccaatcgcttgcccagttaaagcatccacatctacaatgcttatcttgtgttgctcggcgcgatacataatatcattcattgtttgcgtgccgactctatttgcgacaaagccaggcacatcattgacgacaatgacacctttacctaacacattttgcgcgaaattttttacatctaatataatagattccttcgtgtgtgacgtaggtattaactccactaatttcataatacgtggtgggttaaagaaatgtagaccaaagaatcgttcttgatccttctcgttaaatgcttgagcaatcgcattaattggaatacctgatgtatttgtagcgaataaagcatcttctttagcatgttgtagaacttgttgccaaacagcatgcttaatttcaatatcttctttgactgcttcgatatataaatcagcatcatcatttaccaagtcatcatcaaaattaccatatgttaaatgactcgctagatttaagtcgaatagtagcggccgtttcttatctgtaattttatcgtaagattttttcgcaatgagatttggatcgtttttgtccactacaatatctaatagttttactttaagtccagcattcacaaaaagtgctgccagttgagcgcccattgtgcctgcgccaagaacggttactttattaattgtcatagtgattcctccaatttagttgaggataagataaccattaagataattggaataacgttgctattttataaaattgattgagtatctttgacagtcatcttagcctcttatttaaggaaaaagctttatgcttaaaataagtctttttttagtgatattactgcatctcatataattctttgctatttatacgaaagcagaatctccagtcaaagcgcgtccaattactaaggcattaatttcatgtgtaccttcgtacgtgtaaatcgcttctgcatcagagaagaaacgtgcaatatcataatcgtcagctagtatgccattaccacctgtaataccacggcccatagctactgtctcacgcaaacgtaaggcattcatcatcttcgccgttgaagttgcaacctcgtcatattcaccatgtgcttgcatattagctaattgagcacatgttgccattgcttgagctaaattaccttgcatcattgctagcttttcttgtattaactgatatttactaattggtttgccgaattgcttacgctcagtgacataatctaatgtggcacgtaaagcgccagccataccacctgtagccatataagcaacgcctgctctcgttgaataaagaattttggcaatatctttaaagcttgttatgttttgtaagcgatccgcttcatctactttgacattagttaatttaattagggcgttaggaacaatgcgaagtgcgattttattatcaatgacttcaatatcgacgccatcttgttctggtctgactacaaagcaatggggtttgccagtttctttatttactgcgaatactggaatgacatcagatacatgtgcaccaccaatccatttcttttcaccattgataacccaagtatcgccttggcgttcagcgactgtttcaagacctcccgcaacgtccgaaccgtgttctggttcagttaaagcaaagcatgtacgcagttcatgtgactgtaatttaggtacatatttcgcaatttgttctttgctacctccgaaatagaaagtgttatgccctaaaccttggtgaacaccgagtagggtagctaaggaaatatcaaatcgcgcgagtaggtaagacatgaaaaactgaaatagttgactaggcattttggcgtttggacgatccttgtaaagtaatggattgttaaaataatttaattctccaagatctttaaaatagtcctcgggtacagtagcgtctatccaatgttgattaatattttcacggtacttactttctagcaatgaatctacttgttgtaaaaattcgacttcaccgtctgttaaacctttagcaatactaagtacatcttcaggaaataatgtttttaagaccgtttctttttcaaatgtcatataaattcctcctaaaaataatatgaatactaatgtgaaatgcatttaattcaaaaacaacacgctttatttgtaaacgcttacactaaatgtcaaaaatttttatcacctttaaagtgtttgtgagactttgtcattcatcatttgtcgaatcgcaagtttatctggtttctgcgtactgtttaacggcatatgtgtcactggtacatacattcttgggactttataacctgctaaacgacttcgcatatgttgatctaaaatttcagcgtaatgaggttcatcttcgcgaagtataatggctgcagcaattgattcaccatattttggatgatcatagccaacgaccacacaccggtctactagtggatgctcagctaaagcattttcgacttcggatggtaagacattttcgccaccagttatgattaattcttttttgcggtcaataataaatatatcgccatcgtcgtccatcttcgctaagtcaccagttaataaataacgaccatgaaatgctttggcagtctctgctggtttattccaatatcctggcgtgacatttttagccttaattgcaagttcgccaatctcaccagtaggtacttcctcaccgttatcatcaaggatacgtgcatcaacgaacatgactgctttaccaatactcattggcttacgttttgaattttccggtgtattaacaagtacaagaggtgcttcagttaaaccatagccgttaataatgtttatgccatattgtttaaaagctgcttggatacttggtaatggttgtgaaccaccttggatgatataatccatagctttaaaatttttaggattaaaattactagcacgtagcgtactataatacattgtcggaatcatgataataaatgtagggtgatattgtgcaatcatgtcattcaattcttcgccgttaaagtaacgttgaagaataagtgtgccacctgacattaatactggtaatacagtatcgttaaaccctaaaacatggaacattggtgttgatacaatcgtaatatagtttgaattgaacttatacgtcagctctaagtttgcgccgttatgaacaaatgattcatatgagaacatcacacctttaggtgatccggttgtaccacttgtataaattaatgctgcaagatcttgtggttcaacaggtgttgcttgaaaaggttggtgataatctggatttacgatttcatcatattgcgctacatcaatatccatatgcaataagttttggtcaatatcggtgagtgaacttaaatgtttttcagcatagaagagcagttttaattgtgcatcttccacaatggctgcaatttcttttgggttaagccgccaattcaatggtaaaaaaaccgcacctgttttaaaacaagcaaataataaatctaatattgcaatatcatttggcgcaaaaataccgataacatcgccttttttaacaccttgagatgttaaataatgtgccatattatcagcacgtgcattgagttgttggtatgtccaagatgtttgttttgcgtgatcaataacggcaggcttgtcatcatcgaagtctgaacgcgtttttatccaatcgaaattcattagtataccccctttagcttcactttcatactttatgaattgattgtttaagttgtccccatttttctttgtaaatgctggtatcaattaattttaaatgatcagcaataattggtttaaaagccatttgattcaaaatatctttatgcaaatcaagacctggtgcaatttcaattagtttcaagccttgattggtgagttcgaatactgcacgatcagtaacaaaatagacttcttgctcgagtgattgtgaatattgtgcattaaagtcgatatggctcacatctgatacaaatttctggttttgtccttcagtttcaatgtttaatcgttgattatggcatgagacatgactgccagctacaaaagtacctgaaaagataattttatttacagattgcgtaatgtctataaagccaccacatccatttagtcggtcattgaagtaagacacgttgacattgccgtattgatcaacctcagcaaagctaagataggcaactgatacaccattgttataaataaaatcccatgctcgatcatgaggcatgcgcacatctgcattgtaattcataccaaaatgttcacgactcccaacgaatccaccgaaaatgccaacatctagaatcggttgcacatcatgttcaacacattcttcgtgcaataaattagagagttcattattgatgccataaccgatgctaattgtatcgccataagttaaaaactgagcagcacgtcggagaatcaatttgcgactattaaaaggtaatgcgggttcaggtattccatcaattcgttcttctccagacaaggctggtaaataatgactctgaattacttggcggtgattcttttcatcttctgtgacgtatacataatcgacaagatttcctgggataacaacttcattcggttttagttgatagtcgtcaactaaagctttaacttgtacaataactttcccatgattggctttcgtgtttaatgcgacatgataacactcgctcaagtacgcttcttgagttaaataaatgttaccttgttgatctgcgtatgttcctctcagtagtgccacatcaacgctagggaatgtgtaatgtaagtatgtttcatcgttgatggttactaatgaaactaaatcatccgttgttcgtgtatttactttaccgccaccgtatctaggatcaacagctgtgtttaatccgattttagtaataactccaggtaataattgattactctgacgataatgagttgcaatgataccttgtggtaaaaaataagcttcaatgtcattatttttcattgcttgtgccgttttggaagaagccgttaaaatactcataatgacacgtttaatcatgcgacgttctataaaatcatctaaatccggtgcggcacctaaactatggatatcattcgctaatataaacgttaaatcattgggcgtatgatatgtgtcatgttgcgctaacacagcacgtagaacttcggcgggtaagttggctacagctaatgctggtaaaccaatcacatcaccatctttaatgatatgttgtaagtcgtgccatgtgatttgtttcaagcaagtcacctccatcacatttgataaaatatagcgtttttacactttgtgtaaacccttacaagaaatataacataacgacgtttaaaatcaattagaaatatctttttattctgataatagacacagtatagacacattttgatggtcgataacaattgtaatatcaagggtttgtaatgaattgaatatcattaaaatacttatataaaaatattgttcggaatataaaaagttaaataggttttgatttttaaatatgaaatacaaagtgcccaatcgaacaaagtatttatattaaaatatggaaaatccatcaatattaaattaaaatagttttattatgaaaagtgaaagtaggtaagtctatggaaggtcttaatcatcgaagaaatacagaaaaagaagagacaacacaaacgcaatcagttgcacctaatacaggtgaagaggggatgtcatcagcaagtacacaatcaactaagacgtccgacatacataatgaatctatcgataaacaaatggaagccaaagcgcatgaaacagcgcaaaatacagatttaaaaaacgaagcaagaagtttatttgataatgcaaccaaatcaatcggtagactagcgggcaatgatgaaagcttaaatcttaatttaaaagatatgttttctgaagtatttaagccgcatactaaaaacgaagcagatgaaatatttatagcgggtactgctaaaactacgccagcaatttgtgacatatcagaagaatgggggaagccatggctcttttctcgagtattcatcgctttcacagtaacatttattggattatgggtcatggcagcaatttttaataacactaacgcgattccggggctcatttttataggggctttaacagtaccattatcgggtttgttcttcttttatgaatcaaatgcgtttaaaaatattagcatttttgaagttattatcatgttctttattggcggcgtattttcattactaagtacgatggtattatatagatttgtcgtttttagtgatcaattcgaaaggtttggttctttaacatttttcgatgcatttttagtaggattagttgaagaaactggaaaagcactcattattgtttatttcgtcaataaattgaaaactaataagattttgaatggattattaatcggtgctgctattggtgcagggttcgcagtttttgaatcagcaggttatattttgaatttcgctttaggagaaaatgtcccattattagatattgtcttcacacgtgcgtggactgcgattggtggtcatttagtttggtcagcgattgttggtgctgcaatagttattgcgaaagaacagcatggctttgaattcaaagatatttttgataaacgctttttaatattctttttatcagccgttggtttacatggcatttgggatacatcattaacgattcttggcagtgatacgttgaaaatatttattttaatcgttattgtgtggatacttgtattcattttaatgggggcaggtttaaaacaagtgaatttactgcagaaagaatttaaagaacaacagaaaaaagtagacgaataataattaaagcttatgttgctcatatgtttgtgacataagctatttttataatttgtctttaaaagagtggaataggaatacttttcggagttaaaaaagtgtttcacgttaaacaaatagtgacaattagatttatataaaatgaacatgattcactgaaagtatgtaataatcattttattgaaattcatcaaacagaaattaatacaatcatataagcaaattaaaccacgccataatcatattggatgacttcggcgtggtttttatagttgaagcagggctgagacataaatcaatgtcccacactcccttatcgttcaatcgttgttcgataatcgattaaatagataccttcaggtgttactttataatttttaaccttagagttagcagcgactatttgatcgttgtaagcaatataactgtttggtacatctcgacttgataatttaataatatcattagaaatattgtgacgttccttaacatctacagtatgattcaattgattaattaaatcatcgacgttgctattattgtagtctcctttattaatagcaccatcttttttatatgcttgattaaagaaataacctgtatctccacgaggaattgttccgaaactatacatcgttgcatcccatgcagaacggtcttttaagtaaccttctatgtcatcaacacttttaatgtcgatttcaatatttgcttttttagcatctgattgtaatacttgcgcaattttcgatagctctggacgaccgtcatacgtaattaacttaatttttaaagggtgttcttttgtataaccatctttagctaataacatttttgcttgttcgatattttgtttggttaacttaggttctttaatatatggaattttatcattaaatggactcgttgcaggtttcgcataaccttgataaatatgatctgcaataccttgtctatcaatgatatgatctaatgcttcacgaacggatttagtcatttttttattagtatgattatacataagtaaagaagttctaaatccagattcttttgacacttttaaattttgattattttctatgtcttgaactttattaactgggacatcagttattaaatcatctttttgagattctaaatttctgacgcgattattgccgtcttcttggtacgtcacagtaatatgatcaagtttcggtttaccttgccaatagtccttaaaattcgacaatgatatttttcgagattgcttataatcttttatttggtaagggcctgtaccaacaggagtttgattaacatctgatttagcatctgtatcataaattgccataaaaggattagctaattcagatacaagttcagggtaagcggagttggttttaattgtcagtttttgacctttagcggtaattgatgatattggtaatgaatatttgaccaagtcgctttttttcatgctattttcaaggctagatttcactttttctgcagtcaatttttgaccgttttgaaatttaatattatcttttaattctatatctaacgttgtatcatttggttgatgatacgatttcactaatgctttttctatttttccttgatcatttgttttaaataatgattctgcagcaccaatcttaactggtacatctgtttcataaggtgcaatagactttgtttttaacggtaacgaaatatttaagtctttgccagatgaatgcattgagccacatcctgataacactaatactgctgaaaatatagttgctagtcttttaaacttcatttcattaacactctctttctaattactatgtaaaacccaacaattaatattttaaaactttattttgttaaagtaaaatgttgttcaagtttagtaattattaaagttcaattaattgtagtaattatgctttttaaaaataaatattagaaatgaagttagcgacatttatagtgattcacgataaacatatataactaagtattgagcaactgctgtagtactacagcttggttatgtttagtatcttttgctgcatataacaatagaacatgattatgctgatttacaatatcctttaatttttcaaaagcatctttttgcgcatcctgatcacgtaattctttttcatatttttctttaaaagctccaaaaagtttaggatcatgttggaaccattgtcgcaactcagtagaaggggcaatgtcttttaaccaataatctaggttagcagttcttttcgaaatacctctcggccagactctatcgactaggatacgaatagcgtcggtattatctttattgtcataaatccgtccaatatctacggtcatcttgtgaactcctttcttatgaaattcagtgagcatacatcaatgcatgttgtggtgggacgaccaaataaattttgcgaaaatatcatctctgtcctactcccaattaaaaaacagccatgacaaagtaaagtcatagctgttttggtatagatgtcatttatttttacgtttagttaaatacttcaaaccaactgcaaagaccgtgtacccggctatggtttgtatcaatgttttaattaaattattatttttaacaataatatttgcagtaacaatacttacgaaatataatgcaaatacttttacgtaacgttgattaagtttcatatgagcactaaacctcttttctcagttatactgcaacgcttagtcttggaataaatgtttcgtagtgtacgcgatccatatcgtaatttaaagatttaagtgcttcgatcatagattgtaagaattttgtaccaccacagatataaatttcaggtttatttgctaaaaatacttgtaattcttcagcaccaatatagccttgtttatcttttaagtgtgtatataatttagcgttgtcatgatggcttgcgatactgttgaagttgtctttgaaaggtaaatgttgttcattttcagcaacttgaaccatctgtgtatctaaacctttggcagaggcagcttcatacatagctactaaaggtgtaacaccaatacctgaacctaagaaaagttgtggttcagtcgtattctctaatacgaatccacctacaggcgcagctaaattaatcatatcgccttctttaatctcatcgtgtaaaattgttgaaacttcgccttcatgttctgttgtgacatcacgtttaacgccaaaagttaaatggtttttttcacctgatacgatagaatagtgacgtttagctctatatggaagtttatcactagaaacatcaactgtgatgtattggcctggtgtaaattcactaaagtcatattcttcagtttcaactgtaaatgatttaatgtcttcagattcttgtttaatattggtaattttgaatggtttaaaaccaatccacatcatttgatcataaatttctttttcaatttggatgaacacatccgcaataacgccatatgcttttgcccaagcttgaatgacagggtcattttcttctaatcctgtcacgtcttgaatggcttttaataaatttttccccacaattggataatgttcagcataaacttgtagtgcgcagtgtttatatgcgactggcataatgactggtttaataacacttaagttatcgatattaaccgctgcggccattacagcttgtgctaatgctgaagattgcatgcctcgtttttggttcgtttgattaaacatgtttaaaagttcaggatgcgctttaaacatttttggataaaagattgacgtaatttctgtccctttctctttaagtaaaggcaccgtttgtttgataatgtctttctcttgttctgtaagcatgatactcctcctttaatctgtatattttgattattctactaaaaatttcgatattcaattaattggtttgagaaaatataaataaaatggcaaatttgataattgtatgacatttttaattttttaaatacttatcaataagcattgtgtacaattgtctgtttgcacaccgacgattgagcgcatttatttgactaattcaaaaaacattgttgttttcctagaaaaaagtaaacatgataataaaaatgtgaaagtgtaaataatcactggcgaagtacgaagactaaagacatctaagatgtaatcgtatacaaattaaaaaggtgtaaaaattaaaataaaatgtgaaataaatcacaatttaatattgacccagtacttaatgcatgttacattttatatgtgaaataaatcacaaacttaaaagcggatgacacatgaccttttaagttatgcgttgaaaataaaagagatgtttatttgcttttgtatcgtcaataagcagcattaaactaacatatttgaagctacatgtatgttagtgaattaatcataagggagtttttgtaatgaacaaatttaaagggaacaaagttgtattaataggtaatggtgcagtaggttcaagctacgcattttcattagtgaaccaaagcattgttgatgaattagtcatcattgatttagacactgaaaaagttcgaggagatgttatggatttaaaacatgccacaccatattctccaacaacagttcgtgtgaaagctggcgaatacagtgattgtcatgatgcggatctagttgtcatctgtgctggtgctgcacaaaaacctggagaaacacgtttagatttagtatctaaaaacttgaaaatattcaaatcaattgttggtgaagtaatggcatcaaaatttgatggtattttcttggtagctacaaatcctgttgatattttagcgtatgcaacatggaaattctctggtttacctaaagaacgcgttataggttctggtacaattttagactctgcacgctttagattattgttaagcgaagcgttcgatgttgcgccacgtagcgtcgatgctcaaattattggtgaacatggtgacactgaattaccagtatggtcacacgctaatattgcgggtcaacctttgaagacattacttgaacaacgtcctgagggcaaagcgcaaattgaacaaatttttgttcaaacacgtgatgcagcatatgacattattcaagctaaaggtgccacttattatggtgttgcaatgggattagctagaattactgaagcgattttcagaaatgaagatgccgtattgactgtatcagcattattagaaggcgaatatgaggaagaagatgtttatattggtgttccagcagtcatcaatagaaacggtattcgcaacgtcgtagaaatcccattaaacgacgaggaacaaagcaagttctcacattcagctaaaacattaaaagatattatggctgaagcagaagaacttaaataactttttataaaatctataccattccaaaaattgtaaaaccttaccccaaaaaattgtataaagggctatttgatacaactatatgtgtcgagtagccctatttttaatgtagtgaaagtcgttgttgaaattaaattcaaatctggcacttaagctttaatcatagcattaagatgattgtctagcagaggcgatttgcgggctcactacagtgcatgatgaacttaatgcttcaaatgtaacattaaaaataaaagcaacgatgtcacttcttacttcgtacatcgttgccattagttctgttgatatttcggttagtcttaatccccgagcaattcttcaatttcatttttgataactgtaacgtgaggcccataaattacttgcacaccagtgccttgctggattacacctttggcaccagtactttcgagtaatactttatcgactttgtcattttgatgaagtgtgacgcgtagtctcgttgcacaacagtcaacgatttcaatgttatctttgcctcccaaaccagcaacaattgtttgtgctctttcagtagcctcaacttgttgtgctgcagctttatcttctcgaccaggtgttttgaaattaaatttcgtaattaagaatctgaaaacgatgtaatacaaacagaaccacacaattccaataggtatgacgtataggtagtttgttttactattaccttgtagcacaccaaaaagtaagaaatcgataaagcctccactgaaggtttgaccaattgtaatgttgaaaatgtctgccatcataaatgctaatccatcaaagaaggcatggattacataaagaataggtgcgacaaacaagaaactaaactctaaaggttcggtaatacctgttaaaaatgaagtgagtgcagcggataacattaaaccgccgacaacttttttatgttcaggtttagctgtgtgataaattgcaagtgcggcaccacataagccgaacatcatcgtaataaaacggcctgacataaagcgtgacacacctgaataatacttcgtcacatctggatcaccaagttgagcaaagaagatgttctgcgtaccttgaactaagtgccctttgacttctaaagtaccaccaagtgccgtctgccaaaacggtaagtaaaaaatatggtgtaaaccgagtggacctaacaatcttaagatgaagccataaacaaaagtaccgatggcacctgttttcgttacaaatccaccaacatggtaaatgccggcttgtatgcttggccaaatgaaaaacatcaatacacctaaaaagattgcggcaaatgctgtgacaatagggacaaatctagagccaccaaagaaacctaaatacggtggtaataccactttgtgatatttgttgtgaagtattgcagtcataatacctgtgataatcccgccaaaaacaccggtttcaaccgtttgtataccgagcaccatgccttgtccattttgtgcaagctgatcttttgccaatgtgcccgtgatagttaataagccattcatagttgcgttcataattaagaaaccgagcagtgcagctaaacctgcagtacctttatcgcttctagataatccgattgcgacaccaatggcaaagatgaccggtaaattttggaaaacaatactacctgcagctgacattaatgtaaaaatattttgtaataaggtaatatctaaaatagggtatgctttaacggtgtttggattacttaatgcaccaccgatacccaacaatagacctgcagctggtaagattgcgataggtaacataaaggacttgccgaactgctgtgctttttcaaataaagatttcatcaacatccctcctaattattctcaatatagcttttgagaaatttaatatcaatatatattctgtgtatgaaaatatttttcataaaaattgtttgaatcatgtaacaatcatataaattgctgtttatattgttgtgaaaatgagttgacaaaagtcggtatagatatgtagacatcctatttttagcgaggtaggttgataaggcatatcggataaatttataagccataaaatagataaatagtgtttgtatccaaaaatatgagaaagttaaaactatttttcaaaataaacatgattcaccacataaataaatatacataagctatcgataacaacttaagaaaggtggatatataaatgaaaagaaagattattatggattgtgatccaggacacgatgatgcaatagcattaattttagcgggggcaattgacagtccactagagatattagctgtaaccacagtcgcaggtaatcaatcagttgacaagaatacgacaaacgccttgaacgtattggatattatgggacgccaagatatagcagtagcgaaaggtgcggataggccgttaattaaaccagctgcctttgcttctgaaatacatggggaatctggattagatggtccgaaactaccgtcgacaccatcacgtcaagcagttgcaatgccagcatcagatgtgattataaacaaagtgatgacgagtgatacacctgtaacaattgtagcgacaggtcctcttacgaatgtagcaacggcattgattcgtgagccaagaatcgctgagcatattgaatctattactttgatgggtggtggtacatttggaaattggacgcctacagcagaattcaatatttgggtagatgctgaagcagcgaagcgtgtttttgaaagtgggattactataaatgtgtttggtttagatgtaacacatcaagttttagccgacgatcacgtgattgaacgctttgaaagtatcaataattctgttgcacaattcgtcgtagaattattgcaattctttaagaagacatacaagactcactttaatatggacggtggtccaatacatgatgcttgtacaattttgtatttgttacaaccagaattgtttacaatggtacccgttaatatcgacattgaacatcaaagtccactaacttatggtactatggctgtcgatttaaatcatgttacaggtaagcctgccaatgcttattttgctacagcagttgatgttgaagaagtgtggaacttgatagaccataagttacgtacatacgaataataatacttaattaaatagatacagttagccctaaggcgcctgatataagcgtccttagggtttttgtattggattacaatggtcatgacaatttgataatgattgagatatgtatgttaaaaatgcttcaaaaaacacaaaatacaaaaatatattcaaaatttcaattgctttattttaaaagattaaaatcacaaaaaatatagatataattgaaatgttgttaaaacatcacaatgatgtacatgctcattttgaaaatatgtgttcaaagtgtgtacatcggtgtgacgattgatgataaattgagctcagatgctcaaaggaggatcgaacatgaacggggataatcagcaaatactcagagaaattgtattgaatcctactattcatggtaaagaacttgaatcgatatttggtttgtctcgtagacaactaggatatcgcattcaaaaaatcaatttgtggcttgaacaagagggttatccaaaacttgaaagaacaagccaaggaaattttattgtaagttcttaaatcatgacgttattcaaacgagatgtatcagagcagcaaatgttaaacggcaacaatgtcatttttagcatagaaacacgtcgttattatttaatgctcatgctttttagtaaggaaaacgcaatgtctctaaaccatttttcaattgatttacaagtcagtaaaaatactgtcattcacgatataaatcatgtgaaagagcaattggaaaatcatggtttgtcaattaagtattctcgaaaacatggttatgaaattgttggtgatgaatttgaagttcgccgtttcttcattaagttgattgatcaaaggttgaatcatgatattactaaaagtgaagttttaaaggcgctcaacttaacattcgaagatatcgcatatcaaaaagacaaaatcaaacaggtagaacaatttttgaagagtcgctttatagacaaatcacttagttcattgccttatgtcctttgtgtgattcgtagacgaattcaaagtggtcatgtgatgaatccattaaatattaattatcagtatttgagggatacgaaagaatatcaagcaacggagattatgacgcaacttgagccggatttgccagaagcggaaaagttatatttgacattacacttactttcaacaagtgtgcaatggactgatttgcaggaatcagataacatatcgaatttaacgatggctatcgctcaaatgattcaccattttgaacaaatcacttttattaacattgaagataaggagaaattatcacagcaactcttgttacatttaacgcctgctttttataggattaaatataacttaacggatcgtgatgaattaataaatcctttacaaggaaattatcaatccttatttcatatggtgaaacaatcatgtcaatcgttaactgaatatttcggaaaatcgttgcctgataatgaaatagcatatttaaccatgttgttcggaggtagtttgagacgtcaagatgaaaacttcgatggcaagataaaagctattatcgtgtgtacacaaggcacgtcagtatcacaaatgatgttatacgagttgcgaaacttatttccagaaattattttcttagatgcgatttcacttagaacatttgaaaattacacattagattatgacatcgtcttttcaccaatgtttgtcctaacacataaaaaattatttatcacaaaagtagctttatctgaaaatgagcaacgaaagttacgtaaagaagtgatgaagtacattaataaggaatcggctgacattgataaggaaataaacaagttaatggcattaattgaacgcactacgacagttaatgacattacagaactacgtgatggtttagaagattttattgcgaattataattcaatttcaaccattaatggatcgattgtcacacaaaataagacattagatttagctgacttgataccggcaaggcacgtgaaaagaatgcatcatgttgaaaatattgttgaagctattgctaaagcaagtgatgtgttagttgctaatcattttattgatattaaatatattcatgagatgcaacaggtatttgatgattcgtatatggttatcatgcaaaatattgctattccacatgcatactctgaaaagcatgtacataaaacagcgatgagtatgttgatattacaagaaccaatatacatgtcagatggcacagcaatccatattattgtacctattgctgctgttgataaagtgacacacttaagagcgttactacaattgagagatgtggcgcaagacaatgacgcaattaagcgcatcatacaaagtcgcaaaaattctgatgtaaatgagattttaaaaaattattcaaataaagaagcgagggaaaatggatgggacagcaattagtgcataaagaaaatataatgctcaatttgtcggcaactgataaagaatccgtattgtcacaaatgtcagaagtgttatttcaaaatgggttcgtgaagtcaacgtttaaagatgcagtcatcgacagagaaaaagaatttgctactggtttaccaacgcatctatgttcggtcgctataccgcatacagatgtcgaacatattaaccatagaacgataggtgtggctgttctagaaaaagaagtgccgtttattgaaatgggaacacttgatcaacagacagaagtgaaaatcgtttttatgttagcaatggataaagtagatgatcaacttaagttattacaacagttgatgcaaatttttcaaagtgaagaaaaattggagcagattctgcgaacgaaagatgaaacaattttagcaacactaatcaatgattatttggaatataactaaaaattaattggaggaattgaaaatgaaacaagtattagtagcgtgtggtgcaggtattgcaacgtcaacagtagtaaataatgcaattgaggaaatggcaaaggaacacaatattaaagtagatattaaacaaatcaaaattacagaagttggaccttatgaagacactgcagatttattagttacaactgcaatgacaaaaaaagaatataaattcccagttatcaacgcacgtaatttcttaactggtattggtattgaagaaacaaaacaacaaatcttaacagagttacaaaaataacggaattgatatgtaacgtgggtcaataacatataaatatatgcaaattgcatataaatgactatcacgacaaatgattgttgatgacatagaaacgcagtgactgtaattcaaagggactgcagtcgaatgtagtaagggttgtcgttgaaatgaccgtaacgtcaaatgtaatcacaatcggaaagtatcgtgacaatgcatatataacagggagggtttaaatatgagttacttcactgattttgtaaggggatttttagatttaggtgcaactgttattttaccggttgtcatattcttgcttggcctattctttaggcagaaaattggagcggcatttagatctggtttaacaataggtgtggcttttgtagggattttcttagtcatcgatttattagttaaaaatttagggccagcagcacaagcgatggttaaaaatttaggcgtcagtctgaatgtgattgatgtaggttggccagcaacatcatctatcgcttgggcatcatctgtcgcagcatttattattccactcggaatcatagttaacgttgtattgctagtaactaaagtgacaaagacgatgaatgtagatatttggaatttttggcattatacgtttacagcagcaatggtttatgccgtatcaggcagtatttggcaagcgttattagcagcagttattttccaagttatctgtttgaaagtagcagattggacagcaccgatgatgagtgagttctttgatttaccaggtgtatcgattgcgacaggaagcacaatttcttatgcaccaggtatttacttagttaaattgttacaaaaagtacccggtctgaataagttagatgctgatcctgaaacaattcaaaaacgttttggcgcatttggagagtctatctttgtcggcttaattttaggtttaggtattggtgtgttagcaggttacaaacctggagacatcattaatttaggaatgtcaatggctgcagtaatggtattaatgcctagaatggtaaaaatcttaatggaaggtttaatgccagtttcagagtctgcaagaacatggctaaataaacgttttggcgaacgtgaaatttatattggattggatgcggctgtagcattaggtcatccagcggttatttcgacagcattaattttagtacctatcactgttttattagctgttattttaccaggaaaccaagtactaccttttggtgacttagcaacgataccatttgttgtcgcgtttattgttggtgcagcaagaggaaacattattcattctgtcattgtgggtacgattatgattgcaatttcactatatattgcaacagacgtagcacctattttcacagatatggcgaaaggtacgaatgtacaaatgccaaaaggttcatctgaaatttcaagtattgatcaaggtggtaatatcgttaactatcttatctttaaactatttagtctattcaattaaaaatcgaggtgtttgtggtgaaagctttagtaaaaacaagagaaggacatggcaacttagaacttcttgataaagaagttgcaacaccgctagatgataaagtaaagattaaagttcattatgcaggaatttgtggcacagatattcatacttatgaaggtcattataaagttaattttccagtgacattaggtcatgaattttctggtgaaatcgttgaagttggagcagacgttaaagattttaaagttggtgaccgtgtcacttctgaaacgacattctatgtttgtaatgagtgtgaatactgtgaatcaaaagactataatttatgcaaccatcgaaaaggtattggaacacaagttgatggcgcatttactaattatgtcattgcacgtgaagaaagtttgcatcatattccagatgaagtatcgtatcagtctgcagctatgacagaaccattagcatgtgcacatcatggcgtttctaagattcaagtgaactctggcgatgtagcagttgtaatgggacctgggccaatcggattacttgtagcacaagtgttaaaaagtaaaggcgcaactgttgtggtaactggattggacaatgacaaagtcagattagataaagcagaagcattgcacatggattatgtagtcaatttacaacaaacagacttaaaaacgtatatcaatggaattacagacggttacggtgcagatgttgttgttgaatgttcaggtgcagttccagcagcacgacaaggtttggatattttacgcaaaaaaggttactacagtcaaataggtatttttaaggatgctgaaattccatttgatatggaaaaagtgattcaaaaagaaataacagttgttggtagtagaagtcaaaagccagcagattgggaaccttcattgcaacttatggcggatggtttagtaaatgctgaagctttggtgacaaaaatatatgatatttcgaaatgggacgaggcgtatcaacatttaaaatctggcgaaggtattaaagcattacttaagccgctcgatttagatgaaaatgaaggagagaattaatatggtagaatcaatgctaacttttatgcttgggccattaagacaaatcactgatttttatatggaacatttactcgtaagtaattccattgtcattgcaggttattttgcgacaggtatttttaaaaagaaaaaagttgtgaattaaatcaaatttgaggtgatttacaagtgaaagcattgaaattatatggcgtggaagatttacggtatgaggataatgaaaagccagtcattgaaagtgtgaatgacgttattgttaaagtacgagcgactggcatatgtggttcagacacgtcacgatacaaaaaaatggggccatacattaaaggtatgccatttggtcatgaattttcaggtgttgtagatgccattggaagtgatgttacgcatgttaatgtaggcgacaaagtgacaggttgcccagcaataccttgttatcaatgcgagtattgtttaaaagatgaatatgcacgatgtgaaaagttgttcgtcattggctcatatgaacctggatcgttcgcggaatatgtcaaattgccagcgcaaaatgttttaaaggtaccagacaatgttgattacattgaagcagcaatggttgagccatcagccgttgttgcgcatgggttttataaatcgaatatacaacctggtatgactgttgcagtaatggggtgtggcagtataggattgttagctattcaatgggcacgaatatttggtgctgcgcatatcatcgctatagatatagatgcgcataaactagatattgcaacatcattgggcgcacatcaaacaattaattcaaaagaagaaaatcttgagaaattcatcgaaaatcattacgccaatcaaatcgatttagctatagaatcatcaggtgctaaagttacgattggtcaaatattgacgctaccgaaaaaaggtggcgaggtggtattactcggaataccatatgatgatattgagattgatcgcgttcattttgaaaaaattctgcgtaacgagttgacaatatgtggctcttggaactgtttgtccagtaattttccgggcaaagagtggacggcaaccttacattatatgaagacgaaagatattaatgtaaagcctattatttctcattttttaccgttagaaaaaggcccggagacatttgataaattagttaacaagaaagaacgatttgataaagtcatgtttacgatttattagtatgcacctttgaggacgaaaacgctggtatagttatagctatgaaagtgcgaatgccgtctggtctacagatactatcgaaataattcatcttcgaatatacgttgctaaatagccggtttacttgtgtgaaatatgcttgtgaatcggttgttttgcattttgtatacttaaaatgagatgacaatatttgataatttttaaagtgaaaatcaagtacagccacttaataagataaatttattataatatatggtaaaatgatggcagtaataatgaatttgaaaaagagtaaacattaatacctttaacaatttaatatcgtcagtgttaatgattaactgcatggcaaaacaacttagaaaggtcagttacaaaaatacatttttataaaaaattatcacactattgcgacaactacctttgacttaataaaagaggcaagtgagcaataggttaggcttatgttcgggcataggtcagtaatgtataaatggaaatgatgtaatgacagaatggaggacaacatgatttatgcaggtattttagcaggaggtattggttcgagaatggggaacgtgccattaccaaaacaatttttagatattgataataaaccgattttaattcatacaattgagaagttcattttagtgagtgaatttaatgagattattatcgcaacaccagcacagtggatttcccatacacaggatattttaaaaaaatataacattacagatcaacgtgtcaaagtagttgcaggtggtacggatcgaaacgaaacaattatgaacattatcgaccatattcgcaatgtaaatggaattaataatgatgatgtgattgtaactcatgatgccgtaagaccatttttaactcaacgtattattaaagagaacattgaagtagcggcaaaatatggtgcagtagatacagtcattgaagcaattgatacgattgtaatgtctaaagataaacagaacatacacagtatccctgtaaggaatgaaatgtatcaaggccaaacaccacaatcatttaatattaaattattacaagatagttatcgcgccttaagtagtgaacaaaaagaaatcttatcagatgcatgtaaaatcattgtcgaatctggacatgcagttaaattggtacgtggagaactatacaacattaaagtgacaacaccgtatgatttaaaagtagcaaatgccattattcaaggtgatattgccgatgattaatcaagtatatcaactcgttgcaccgagacagttcgacgtcacatataataatgttgatatttatggtaatcatgtcatcgtaagacctttatacttgtctatttgtgcagctgatcaaaggtattacacaggtcgaagagatgaaaatgtactgcgcaaaaaattgccaatgtcattagttcatgaagctgttggtgaagttgtattcgatagtaaaggagtatttgaaaaaggtacgaaagtagtaatggtgccgaatacacctacagagcaacatcatattatcgcggagaattacttagcctctagttattttagatctagtggttatgatggttttatgcaagactacgttgtgatggcacatgatcgtatcgttccgctgcctaatgacattgatttgagtacgatttcatacacagagttagtgtcagtaagttatcatgctatacaacgatttgaacgtaaatctatacctttgaaaaacagctttggtatttggggtgatggtaacttaggttatattactgctattttgctacgtaagttgtacccagaagctaaaatttatgtatttggtaagacagactataaattaagtcatttttcatttgtagatgacatctttacagtaaatcaaataccagatgatcttaaaattgatcatgcatttgaatgtgttggaggtaaaggaagtcaagttgcacttcaacaaatagttgaacatatttcaccagaaggcagtattgctttgttaggcgtaagtgaattacccgtggaagtgaatacacgattagtacttgaaaaaggattaacgttgattggtagtagtcgaagcggctctaaagattttgagcaagttgttgatttatatcgtaagtacccagacattgttgaaaagttagcattattaaaaggacatgaaattaatgtatgtacgatgcaagatatcgtccaagcgtttgaaatggatttatcgacatcttggggaaaaacagtattgaaatggacgatttaataaaccgatgggggaataacaatgacaaaaacgaaacaagcaatacatattgataacatatactgggaacgtgttcagttatatattgaaggacatagtgaaggtgtcgatttaacatcaggacaatttgttctgaggaatttaaccgaaacaaaaacattagaagcaaatgaaatgaaaatagacggtaatacatttatatgtagattcaacgtcgcaatattagacgatgggtattatttaccaatggataaatatttatttgtttatcatgaccagttagagtatattggacaacttaatccaaatattattaatcaagcttatgcggcattaaatgaagagcaaattgaagaatacaatgagctgactacacaaaatggaaaagcaaactatgtgttagccaacgaagctaaagttttccgcaaaggtggcgtatcacaacatacggtctataccattactccggaaatagcaagtgacgttaacgaatttgtatttgatattgaaatcaccttacctcaagagaaatcaggggtcattgcgacaagtgcacactggcttcataaacaaggtcataaagcttcatttgaaagtagaagtttcttatttaaagctatttttaatattacaaagttactacatattaaaagaagcaaaacaatattattcacatcagattcgcgtccgaatttatcagggaatttcaagtatgtatatgatgagttactacgccaaaaagtagattttgattatgatattaaaacggtatttaaggcgaatattacggatagacgtaaatggagagacaagtttagattgccatatttacttggtaaggcagattatatttttgttgatgatttccatccattaatttatacggttcgctttagaccatcacaagaaattattcaagtgtggcatgccgttggtgcttttaaaacagttggctttagtcgtacaggtaaaaaaggtggtccgtttatcgattcattaaaccatcgtagttacacgaaagcatatgtttcatcagaaaccgatattccattttatgctgaagcatttggaattagagaagaaaatgttgtaccaacaggtgtaccacgtactgatgtactatttgatgaagcttatgcaacacaaattaaacaagagatggaagatgaattgccaattataaaaggtaagaaagttattctattcgcaccgacatttagaggtaatggtcacggtacggcacattatccattttttaaaattgattttgaacgtttagcaagatactgcgagaagcataatgcagttgtgttattcaaaatgcatccgttcgtaaaaaatagacttaatatttcacgtgaacatagacaatactttatcgatgtgtcagatcatcgtgaagttaacgatattctctttgttacagacttgttgattagtgattattcatctttaatatatgaatatgcagtatttaaaaagccaatgattttctatgcatttgacttagaagattatattacgacgcgtgatttctatgaaccatatgaatcatttgttccaggtaaaattgtacaatcctttgatgcattaatggatgctttggacaatgaagattatgaggttgaaaaagttgtgccatttttagataaacattttaaatatcaagatggtcgctcaagtgaacgtttagtcaaagatttgtttagacgctaatgttggcatatattacttgccatgcaaatgagtcataaggcatagttttcaagaagggttctgacaatgaagtgagcaacatgtcatgatgagaagcaggactatacaatgagaataaccttttgatttttcatgcataagaggctgggacataaatccctaaaaaacagcagtaagatattttctaattgaaaattatcttactgctgttctctatttatacaatacttcgtattgaatggcttcgctttgcccgtctggcacattactgtaaaattctataaatagaatttttgatgacgggtcccttcctagggtgccgtctcagccaccccaacttgcacattattgtaagctgacttttcgtcagcttctgtgttggggcccctgtcttcgactggcactgctccctcaggagtcttgccattaatactacgtattaacatgtaattttacttttaaatactttgaaaaataagatactttgcccaacttgcacataaatgtaaaattcaataaaatgaattttctgtgttggggcccctccccaacttgcacattattgtaagctgacttttcgtcagcttctgtgttggggcccctgactagaattgaaaaaagcttgttacaagcgcattttcgttcagtcaactactgtcaatataacttcgtagagcatagaacattgatttatgtcccagcctgttccaactgaattgtcattttgtaaaataaaataatcaatccaatcgttatctaattcataaatgtgtaaacacatacgttatgaatggataacgattttttgttatgttaaagtggtacattaatcatgtatttcgtatgataattaacgacaagtgtaatggttaaatgtattttatgatgaaatgctataataggcatggttacaatgagcttgctcatatatattaatataattacaaaaacacgtcggaggtacgacatgattaaaactacaattaaaaaattgatagaacacagtatatatatgacatttaaattactatcaaaattgccaaacaagaatctaatttattttgaaagctttcatggtaaacaatacagcgacaaccccaaagcattatatgaatacttaactgaacatagcgatgcccaattaatatggggtgtgaaaaaaggatatgaacacatattccaacagcacaatgtaccatatgttacaaagttttcaatgaaatggtttttagcgatgccaagagcgaaagcgtggatgattaacacacgtacaccagattggttatataaatcaccgcgaacgacgtacttacaaacatggcatggcacgccattgaaaaagattggtttggatattagtaacgttaaaatgctaggaacaaatactcaaaattaccaagatggttttaaaaaagaaagccaacgttgggattatctagtgtcacctaatccatattcgacatcgatatttcaacatgcatttcatgttagtcgagataagattttggaaacaggttatccaagaaatgataaattatcacataaacgcaatgatactgaatatattaacggtattaagacaagattaaatattccattagataaaaaagtgattatgtacgcgccaacttggcgtgacgatgaagcgattcgagaaggttcatatcaatttaatgttaactttgatatagaagctttgcgtcaagcgctggatgatgattatgttattttattacgcatgcattatttagttgtgacacgtattgatgaacatgatgattttgtgaaagacgtttcagattatgaagacatttcggatttatacttaatcagcgatgcgttagttaccgactactcatctgtcatgttcgacttcggtgtattaaagcgtccgcaaattttctatgcgtatgacttagataaatatggcgatgagcttagaggtttttacatggattataaaaaagagttgccaggaccaattgttgaaaatcaaacagcactcattgatgcattaaaacaaatcgatgagactgcaaatgagtatactgaagcacgaacggtattttatcaaaaattctgttcattagaagatggacacgcgtcacaacgaatttgccaaacgatttttaagtgataacttaaaaacaataaaaaattataaattaattagttaagtgatataaataataaacgaaatgtttgcttgtatgttattatttgtgtatgaaaacgtctgatataatgtaatataggtttaaacaaaatatgctaaaatataagcaaaatatgtataattttaagtaatacacagacatttagagttttgattttaaaatgagttttcaattggaaaatgcaacgaaatttaaataattaaatatagatatagttgaatggaggaagtattttatgaaatacgctggtattctagctggaggtataggctcaagaatgggtaacgtacctttacctaaacaatttttagatttagacaacaaaccgattttaatccatacattagaaaaatttattttaattaatgattttgaaaaaattattatcgcgacgccacaacaatggatgacgcatacgaaagatacacttagaaaattcaaaatttctgatgaaagaattgaagtcattcaaggtggtagcgatcgtaacgatacaattatgaatatcgttaaacatattgaatcaacaaatggtattaacgatgacgatgttattgtgacacatgatgcagttagaccatttttaacacatcgtattattaaagaaaatattcaagctgctttagagtacggtgcagtagacacagtgattgatgctatagatacgattgttacatctaaagataatcaaacgattgatgcaattccagtgcgtaatgaaatgtaccaaggtcaaacacctcaatcgtttaatattaatttattaaaagaaagctatgcacagttgagtgatgagcaaaagagtattttatctgatgcttgtaagattattgtagaaacaaacaaaccggttcgacttgtaaaaggtgagttatataacattaaagtaacaacaccttacgatttaaaagtagcgaatgctattattcgaggtggtattgccgatgattaatcaagtatatcaattagttgcacctagacaatttgaagttacgtataacaacgtagatatttacagtgactatgtcattgtacgtcctttatatatgtcaatttgtgctgccgatcaaagatattatactggtagccgtgatgagaatgtcttatctcagaaattgccaatgtctttaattcatgaaggtgttggtgaggtcgtatttgacagtaaaggtgtgtttaataaaggtacaaaagtagttatggtaccgaatacgccgacagaaaaagacgatgtcattgctgaaaactatttaaaatcgagctacttcagatcaagtggacatgatgggtttatgcaagattttgtgttgctaaatcatgatagagctgtaccactacctgatgatattgatttaagtattatttcatatacagagcttgtaacagtaagtttgcatgctattcgtcgttttgaaaagaaatctatttcaaataaaaatacatttggtatttggggtgatggtaacttaggttacattacagccattttattacgtaaattatatccagagtctaaaatatatgtttttggtaaaacagattataaattgagtcacttctcatttgttgatgatgtcttctttattaataaaatacctgaaggcttaacatttgatcatgcatttgagtgtgtgggtggtcgcggtagtcaatcagccataaatcaaatgatcgattacatttcaccagaaggaagcattgcactgttaggtgtaagtgagttcccagtagaagttaatacacgtctagtattggaaaaaggactaacgttgattggtagtagtcgaagtggttcaaaagatttccaagatgttgtagacttatacattcaatacccagatattgtagataaattagcgctgttaaaaggtcaagaatttgaaattgcaacaattaatgatcttacagaagcttttgaagcagacctgtctacatcttggggtaaaacagtattaaaatggattatgtaaatagaaaaggatgaattaacgttggttaaaagtaagatatatatagataaaatctattgggaacgtgttcagttattcgttgaaggacatagtgaaaacctagatttagaagatagtaattttgtattaagaaatttaactgagacacgtacaatgaaggcgaatgatgtcaaaatagatgggaatcaattcgtttgtcgtttcaatgtagctatcttagataatggttattacttacctgaagataagtacttattagtgaatgagcaagaacttgattatattgcacagttaaacccagatgtgattaatgatgcatatcaaaatctaaagccagaacaagaagaagaatacaacgaattagaaacacaaaatggtaaaatcaatttcttattgcagacttacctaaaagagtttagaaaaggtggcatttcgaagaaaacggtttatactgttacacctgaaatttctagcgatgttaatgaatttgtccttgatgttgttgtaacgactccggaagttaaaagtatttatatcgttcgtaaatataaagaattacgtaagtattttcgcaaacaatcatttaatacaagacaatttatttttaaagcgatatttaatacgacgaaatttttccacttgaaaaaaggaaatacggtgttgttcacatcagactctagaccaacgatgtctggaaactttgaatacatctataacgaaatgttacgtcaaaatttagataaaaagtatgatattcacactgtttttaaagcgaatattacagatagacgtggcatcatcgacaagtttagattgccatatttacttgggaaggcagactacatttttgttgatgactttcacccattgatttatacagtgcgttttagacgttctcaagaagttattcaagtatggcatgccgttggtgcctttaaaacagttggctttagtcgtactggtaaaaagggtggaccatttattgattcattaaatcatcgtagctatacaaaagcttatgtatcatctgaaaccgatattccattctacgctgaagcatttggtattaaagagaaaaatgtagtgcctacaggtgttccacgtactgatgtactatttgatgaagattatgcgacacagatcaaacaagagatggaagatgaattaccaattattaaaggtaagaaagtcattcttttcgcaccaacatttagaggtagtggtcatggtacagcacattacccatttttcaaaattgatttcgaacgtttagcaagatattgcgaaaaaaataacgcggttgtattatttaaaatgcatccatttgtgaaaaatagacttaatattgcagacaaacataaacaatattttgttgacgtttctgactttagagaagttaatgatatactgttcataacagatttattaattagtgactattcatctttaatatatgaatatgcagtatttaaaaagccaatgattttctatgcatttgatttagaagattatattacgacgcgtgatttttatgaaccatatgaatcatttgttccaggtaaaattgtgcaatcatttgacgcattaatggacgccttggacaatgaagattatgaaggagaaaaagtcattccattcttagataaacattttaaatatcaagatggccgatcaagtgagcgtttagtcagaaatttatttggtagctaagtttatatagtagtcaaagtgggagaggtataatgatgaaattttcagtaatagttccaacatacaattcagaaaagtatataacagaattacttaatagccttgcgaaacaagattttccgaaaactgaatttgaagtggttgtagttgatgactgttcaacagatcaaacgttacaaatagttgaaaagtatcgtaataaattgaacttgaaagtaagtcaactcgaaacaaattctggtggtccaggtaaacctagaaatgtggctttaaaacaagcagaaggtgaatttgtattatttgtggactccgatgactatataaacaaagagactttaaaggatgcagcagcatttattgatgaacatcactcagatgtcttgttgattaaaatgaaaggtgttaatggtcgtggtgtaccacaatctatgtttaaagaaacagcacctgaagttactttgttaaattcaagaattatctatactttaagcccaactaaaatctatagaacagcattactaaaagataatgacatttattttccagaagaattaaagagtgcagaagatcaattatttacaatgaaagcatatttgaatgcaaatcgaatcagtgtgttaagtgataaagcgtattattatgctacaaagcgtgaaggtgaacatatgagtagtgcgtatgtttcacctgaagacttttacgaagtcatgagattgattgctgtagaaatattaaatgcagatttagaagaagcccataaagatcaaatcttagcagaatttttaaatcgtcattttagtttttctcgtacgaatggcttctcacttaaagttaaactagaagatcaaccgcaatggattaatgctctaggagactttatacaagcagttccagaacgtgtagatgcattggtgatgagtaaattacgaccattgttgcactacgcgagagcgaaagatatagacaactatagaactgtagaagaaagttaccgtcaaggtcaatactaccgttttgatattgtagatggtaaattaaacattcaattcaatgaaggcgaaccatactttgaaggcattgatatcgctaagccaaaagtgaaaatgacagcatttaaatttgataatcataaaattgttacagagctaacgttaaatgaatttatgattggcgaaggacattatgatgtcagacttaaattacattcacgaaacaagaagcacacaatgtatgtacctttaagtgtcaatgcgaataaacaatatcgttttaacattatgttagaagatattaaagcgtatttacctaaagaaaaaatttgggatgttttcttagaagtccaaataggtacggaagtatttgaagtgcgtgttggtaatcaacgtaataaatatgcatatactgcagaaacaagtgcattaattcatttgaataatgatttttatagattaacaccgtatttcacaaaagactttaataacatttcgttatactttacagctattacattaacggattcaatctcaatgaagttaaaaggtaagaacaaaatcattttaactggtctggatcgtggttatgtatttgaagaaggtatggctagtgtcgtgctaaaagacgacatgattatggggatgttaagccaaacgtcagaaaacgaagtggaaatcttacttagtaaagatattaagaagcgagacttcaaaaatattgttaagttaaacactgtacatatgacttactcgctaaaataaataataaatgccctcaaatctatgtgaactaacatgatttgagggttttattttgctatttatgaaatgattatgacatttccctgattttcattttcatatacattaaattgtatacactgaaaatgaggaggtcgtctataatgataaataaaaatgacatagtagcagatatagtaacagattatccgaaagcagcagatatttttagaagcgtaggtatagacttttgttgcggtggacaagtaagtatagaagcagcatccttagaaaagaaaaatgtagatttgaacgaattattacagcgtctcaatgacgttgaacaaacgaatacaccaggttcgcttaaccctaaatttttaaatgtttcgtcacttattcaatatattcaagcagcatatcatgaacctcttagagaagaatttaaaaatttaacaccttatgtgacgaaattatcgaaagtacatggacctaaccatccatatttagtcgagttaaaagaaacatatgatacatttaaaaatggcatgttagagcatatgcaaaaagaagatgatgttgattttccaaaactaattaaatatgaacaaggtgaagtagtaaacgatattaatacagtgattgatgatttagtatctgatcacattgcaacgggacaattgttagtgaaaatgagcgatttaacatctagctatgaaccaccgatagaggcatgtggtacgtggcgactcgtttatcagagattaaaagcacttgaagtgttaacacatgagcatgttcatttagagaatcatgttttatttaaaaaagtatcataaataacgcgattagaaactgttggcaaagtaatgtcagcagtttttcgctatacttaacagaaatttagtgatatgaacagcattatttgaaaagaaaaatggtcaacttagcataaaaattgatatgaaaatttaatggtatagataattaaatagtagcgtgtttttttaataatttattcatgaattttacatgcactattatgataaaataaacataattataattcactgaggtgctatcgtgctatcgctaacaatgttattacttgagcgtgtaggtttaattattattttggcctatgtgttgatgaatattccatattttaaaaacttaatgaatcgtcgacgtacatggaaagcacgttggcaattatgtattattttcagtttgtttgccttaatgtctaatttaactggtatcgtcatcgatcatcaacatagtttgtcaggaagtgtgtacttccgtttagatgatgatgtatctttagctaacacacgtgtattaacgataggtgtcgcaggattagttggtggcccttttgtaggtctatttgttggcgttatttcaggtattttcagagtgtatatgggtggggcggatgcacaagtttatcttatctcatctatatttatcggtataattgctggttattttggcttacaagctcaaagacgcaagcgttacccgagtattgcgaaaagtgccatgattggaattgttatggaaatgattcaaatgttgagcattttaacattttcccacgacaaagcatatgcggttgacctcatatcattaattgcactaccaatgattattgttaatagcgtcggtacggcgatttttatgtctattatcatttcaacattaaagcaagaagagcaaatgaaggcggttcaaacacacgacgtactgcaattgatgaaccagacattgccgtattttaaagaaggattgaatagagaatcggcacagcaaattgcgatgattattaaaaatttaatgaaagtatctgccgtagcaattacaagcaaaaatgaaatcttatcgcatgtaggtgcaggtagtgatcatcacataccaacaaatgaaatattaacaagtctgtctaaagatgtattgaaatcagggaagttgaaagaagttcatactaaagaagagattggttgtagtcatccgaattgcccgcttagagcagctatcgtgataccacttgagatgcatggttctatcgtcggtacattgaagatgtattttacaaaccctaatgatttaacttttgtggaacgtcaacttgcagaaggattggcaaatatttttagtagccaaattgaacttggtgaagccgaaacgcaaagtaagttattgaaagatgctgagattaagtcattacaggcacaagtgagtccacattttttcttcaattcaattaacacgatctcagctttagttagaataaatagcgaaaaggcacgagagttactattagaattgagttattttttcagagcgaatttacaaggctctaagcaacatacgattactttagataaagagttaagtcaagtgcgtgcatacttatcactcgaacaagcacgttatccaggaagatttaatatcaatattaatgttgaagacaaatatcgcgatgtgcttgtaccaccatttttaattcaaattttagttgaaaatgccatcaaacatgcgtttacgaatcgaaagcaaggtaacgatattgacgtgtcagtgattaaagaaactgcaacacatgtacgtattattgtacaagataatggtcagggtatttctaaagataaaatgcatttgttgggagaaacatctgtagaatcagagtctggaactggtagtgctttagaaaatttaaacttacgcctaaaaggattatttggaaaatccgcagcattacaatttgaatcgacatcgagcggtaccactttttggtgtgtacttccttatgaaagacaagaggaggaataaatatgaaagcattaatcatagatgatgagccattagcacgtaatgaattaacatatttattaaatgaaattggtggttttgaagaaattaatgaggcagaaaatgtaaaagaaacattggaagcactactgatcaatcaatatgacattatatttttagatgtcaatttaatggatgaaaatgggatcgaattaggagctaagattcaaaagatgaaagagccacctgcgattatttttgcaactgcacatgaccaatacgcagtacaggcatttgaattaaatgcgacagactatattttgaaaccgtttggtcaaaaacgtattgaacaagcagtcaataaagtgcgtgcgattaaagccaaagatgataataacgcaagtgcaattgcgaatgatatgtcggcgaattttgatcaaagcttacctgttgaaattgacgataaaattcacatgttaaagcaacaaaatattattgggattggcacacataatggtattacaaccatacatacaacgaatcataaatacgaaacaacagagccattgaatcgttatgaaaaacgattgaatcccacttattttatacgtattcatcgttcatatattattaacacgaaacacattaaagaagtgcaacaatggtttaactacacttatatggtaatattgacaaatggtgtcaagatgcaagttggacgttcatttatgaaagattttaaagcgtcgataggattactttaacagtaatccttttttttatgcattttacctatgatattttgtatttcggactaaaaatcacgcaaatcgaagtgagccatctatactttagttaaatcaaacgtaggaggcaatggtcgtgaaacaacaaaaagacgcatcaaaaccagcacacttttttcaccaagtcattgtaattgctttagtactctttgtatcgaaaataattgaatcatttatgccaattcctatgcctgcatcagtaatcggtttagtattattatttgtattattatgtactggtgctgttaagttaggcgaagtcgaaaaagtaggaacgacactaacaaataacattggcttactcttcgtaccagccggtatctcagttgttaactctttaggtgtcattagccaagcaccatttttaatcattggactaataatcgtctcaacaatactattacttatttgtactggctatgtcacacaaattattatgaaagttacttcgagatctaaaggtgacaaagtcacaaaaaagatcaaaatagaggaggcacaagctcatgattaaccacttagcactaaacacaccttacttcggaatactgttatccgttataccatttttcttagcgaccatattatttgaaaaaacaaatcgtttcttcttattcgcaccgctatttgtcagtatggtatttggtgtggccttcctctatttaacaggcattccgtataagacttacaaaataggtggagacattatttacttcttcttagaaccggcaacaatctgttttgcgattccgttatataaaaagcgtgaagtgcttgttaaacattggcatcgtatcatcggaggtattggtatcggtacagttgtagcgttattaattattttaacttttgcgaagttagcacaatttgccaatgatgttattttatcaatgttacctcaagcagcaactacagcgattgcgttaccagtatcagctggtatcggtggtataaaagaattaacatcattagcagttattttaaatggtgtcattatttatgcactaggtaataaattcttgaagcttttccgaattactaaccctattgcccgaggattagcacttggaacaagtggtcacacattaggtgtagcaccagccaaagaattaggacctgtagaagaatcaatggcaagtatagctttagtgttagttggtgtagttgttgtagcagttgtgcctgtctttgtagcaatattcttctaaaacgaaaaacctaagcaagataatagcaatttgagccattgttattatcgtaaaaaaacgtctatactccagtttataactgggatatagacgtttttatgtatttattactttttactaggaatataaaactgtgcatgacgataatgaaatacgatgtcagacgaatcaaagggtttgccagtcattgtataaaaagtctggtggtaacgtaaacatggttcacctgtagacaattgtagtaatgaagcttcacttgaagtgagtttatctacattaaagaaaatatctgaaaaaccaatacgaagtttcatgtttgattctaaataatcgaagatagagcccttagcaatatcatcatttaaatatttcacgatttctttatgataataagaatattcgatacataaaacatcatcgtccacgaatcttaatcgctctaaatagtagacggtatcatctgcatttaattggagctcatcttgtacagatttaggtggcgttgcaatctccttaaaaacaagtaccttacttgtcattcggtgttcacctaaacttttagagaaaccattagtcttaaagacgttgatacgattggcatcagcaatatttctcacataaataccactgccttgtgcttgatagatcaaaccatcttgttccaataagcctaatgctttaatgatagtactcttacttacttgataacgttcttttaattgcgtcacgcttggcaatttatcaccgggtttgaaattagattgatgtataaacgcattaagttgcttagcaatatgttcatactttaacaatattctgtcctcgtttcactttgtctgtaattattatagcacaaaatattataattgtatcggcgtttacaaattgaaccggtacaattataattggaggtaagtaaatacattttcattctactatcaagttgagggggtaatatttatgagcaataaatataaagaacaagcccaagacattcttacagctgtaggtggtgtcgaaaacattgttgatgcaacgtatgatacgaagtgcattacaattcatatgcaacatacaattccttctacagcaaatgaagtgaaacaaatagttgatgtgacatctgtagcagaaaatgatgcgcagttagtcataaaattaaatggaaatgtcgatgaagtgtatcagcaattacagcgattaattaagaatgctaatgttgaagatggtacgaatactgacaatattaatagccaagatacaagttatacacctcaagtaaaagtaacaacaccaattttagtgaaagcaccaatcgctggtcgtcgtattttacttaaagaagtaagagattcaatttttagagagaaaatggtaggtgaaggcttggcaatcaaagctcatgaagaatccaaagtaatcgcaccggtcaatggtttaatatctatgattgtaccaactaagcatgcagttggtattcaatcagaagacggtgtggacatagtcattcatattggcgtgaatacagttgacttggaaggtaaagggtttaagtgctttgtaaagcaaaatgatcgtgttgaagcagggcaaacgttgttacaattcgaccagcaatatatacaacaacaaggctacaatgctgacgttattgtcgttattagcaactctgccgatttaggaaaagtagaactgacaatgaatgaaatcattacgactgaagatgttatttttaaaatatttaaaaactaggagtgtgttgtaataatgaccaaattaccgcaaaattttatgtggggtggcgctcttgccgcaaatcaatttgaaggtggatatgataaaggtggcaaaggattaagtgtaattgatgttatgacgagtggtgcacatggcaaagcacgtcagattacagaatctatagatcccaatcactattatccaaatcatgaaggtattgatttttatcatcgttataaggaagatattgccttgtttaaagaaatgggattgaaatgtttacgtacgtcgattgcgtggacacgtatctttccgaatggggatgaagatgtgccaaatgaagaaggactcgccttttatgatcgtatctttgatgaattaattgcacaaggtattgaacctgttgtgacgttatcacattttgagatgccacttcatttagcgaaacattatggtggatttagaaatagagaagttgtcgattattttgtgcattttgcgcgtgttgtatttgaaagatataaagataaagtgacatattggatgacgtttaatgaaattaataatcagatggacacatcaaatcctatctttttatggacgaattctggagtagcattgacagaaaatgataatcccgaagaagtcttgtatcaagtagcacatcatgaacttttagccagtgctttagcggttcgtcttggtaaagagatcaatccgaagtttaagattggaacaatgatttcacatgtacccatttatccatattcgtgtcatccgaaagatatgatggaagcacaaattgcgaatcgcttacgtttctttttcccggatgttcaagtaagaggttattatccaagctatgctaaaaaaatgttggcacgaaaaggatatgatgttggatggcaagaaggggacgacagtattttacagcagggcacggttgattatattggctttagttattacatgtctacggctgtaaaacatgatgttgatactacagttgaaaacaacatcgtcaacggtggtttgaatcattctgtggagaatccgcatatcgcaacgagtgattggggttgggcgattgatccagatggcttaagatatacattgaatgtgttatatgatcgttatcagttgccactttttattgtggaaaatggttttggtgcagttgatgaagtggtagatggacatattcatgatgattatcgcattgaatatttaaaagcacatattacagcagcgatggaagcagttgatcaagatggtgtagatttaatcggttatacgccatggggaattattgatattgtttcatttacaaccggtgaaatgaagaaacgctatggtttaatatatgttgatcgagataatgatggtcatggcacgatggaacgcttgaaaaaagattcgttctattggtatcaacaagtgatagcatcaaatggagataaattataaaggtatattataaatattttagggttagagcccgagacataaattaatatctcaggccctacagtgttatattggcgggctcccaacatagagaaattggaacagcaatttctacagacaatgcaagttggcggggccccaacacagagaatttcgaaaagaaattctacaggcaatgcaagttggggagggacagaaataaatttttcgaaaatatcatttttgtcttactccctttatcatttctgtcctaatcccgtgatgttaaaattttaagaaaaaaataatgccactaactaagtatgtatagtgttaatgtttgagtgtttatgaaagtctttaaccaaaattgatgacttactaatcaacgataacgatattgttaagtagatgattagtgtcacaaagaaattaaagtgatagtcaaacatagatacaaagtacagttagtggcattatatttagtcctcttttttagcgacaaaagtaatataattcatatctttacgcaatttagtcatcgttttaaacattttacaaaacattgatcgattttctttttttaaagcattgttgataatctttatagttccaacaataccttcgtcataaattaaaccttttggtgtcattaaactcattggaccagtatgataatgcacatgattaaaaccagcttgattatataaatctaaccagccaagtttcgtctgcggtgagacattgacattaatagctgcagataatgatttaactacatgtgtggcatgtgattcattaacgatgacaatatcatgtgttaacaagatacccccaggctttaagactcggtagtactcgcgtaatgctttttcctttatggcgatgggtaacattgttaacattgcttcatttaaaacgatatcgaattgattgtcatcaaagggcaatttaacagcattcgcttgttgaacttgaatatatgattcaagacctgctgctgaaatattttcctgtgctttttctaatgctttcttatttatatcaacgccttgaatgtgacagccatatgtatgagctagataaatagatgttgtgcacatattacatgccacttctaacacttgtttatcttgtgaaaatgccccttgttgtattaaccaatctgttgcttctttaccaccggggcgtagacgagtttttcctaatttagctaaaaatgtatgaccagcttctttagacatagcataacctccttgtaattgataattattatcattaatatagcatatttatatgcgataatttggaagttaaaaagattacaaaaaattgtcacttcatttataactaaacatgagtcatcaagcataggtttagtggaaaattatttctaatagatgatgttttataaagataaaaaagcacagccatgatatacgaatgttgcaagttatatgctaaaccttcatatcatagctgtgtttgattcatttaaacttgatttacttcttctagtagaggaatagatgcttgcgcgccgtgtttttgtacagtgagtgagctcgctttattaccaaaatcaatagcatctgctaagttatcttgcgacttgtttaagcgactgacaaatgcaccaataaatgtgtcgcctgcagcagttgtatcaatcgcatttactttataagcttcgatgtgttggctttgatttttagtagcaaaatatgtaccttgcttacctagcgtaatcaaaacagtcttaatgcctatagataaaaagtaattggcattgtctttcatagattgttcattagttactttaatcccagataacaattcggcttctgtttcgtttggcacaataatatcgattaatgataataattcattaggtaatgctttcgctggtgcaggatttaatactgtcgtcacaccatgtgccttggcaatttcaaatgcagatataatagccgggatgggtacttctaattgtgcaacgacaaagtctgcattgattatagcgtcttttgcgttaataacatcttcaggtgtcatcgtcatattcgcaccaccataaacatagatggtgttttgtccttctgcattcacagtgataaaggcttggcccgtttttgcttcagctgttttgataatatatgatgtatcaatatgagctgctttaaaatcttctaagatgaaatcagcaacgccatcagtgccaattttagtaataaatgttgtgtctgcttgcatgcgtgcagtggcaatagcctggttggcacctttacctccgccgaatgctttttgtgcttcttcaacatgtaatgtttcgcctggttgtgcatatctttcaactgttaaaaattgatcgacattcgttgaacctaaaataacaactttgttggtcatgtgtacgctcctttcaagttataacttttaaaaagtaacattcgattctaatgcaatattagagtagggcgttgtttcaccagtacgaatattacctttatttaatgtgtgagctaagttacttttcatttcttcgtgaggaatgaaaatgatttctatttccgatgaaatcaattgtttaatttgttgcaattgtgtagggttatgttcttttatttcttctgctaagtatattttttggatttccatttcttctaacactgtagctaagacatcaataaagcgtggtaagtttttagttacagctaggtcgatacgacgatgatcatttggaattggcatgccagcgtcattaatcgttaataaatcaaaatgaccaattgtcgcgattgcttttgaaatatgttcatttaaaacagctgattttttcatgacatctacactccttattttataaatactgtaacagaagcggctactaaaatgagtactaagccgatgattgtaataaccatttcttttgacgttttatgttgttttaagaaataaataccagttaatgtagcaagcacaacggatgtttgagaaagaataaatccagttgctaaaccattcatattaggttgtgctgaaataagatatgttaaagcaccaaatgcaaagaagaaacctgaaataatttgtaaccacgtaattttattacggaatggattctctgctttcatattcataaagccataaatgactgcaacaattaccatacccattgcttgaggtaaaaaggcagttaggccatcaatagaagttgcttgcggtgcagctgaatataaccagtatccaaattcaccaattaacagaagtaccactgcacgacgtaaatttttggcgttacttgcttctttgcgttcactccaaactgtcatacgcgctccaattagaataacgactaaagctgtaaatccaatgattttatgaccaatgcctggccaatttcctaatgcaaagacaccccataaagatgcgcctaataattggaatgctgttgtgactggcatggcacgagatgagccgactaattcgaacgctttaaatgtaatgatttgtccgaatccccatcctgcacctgataataaggcgaatagcaaattggttccagtagggaagccacttgatgtgactacggctaatataatagcgaagattaacgtacctacagtagcaccgataatttgatgtacaggtttaccaccaaactttgaagcgactgttgggaagaagccccagccaattaaggggcctaacccgataagtaatgcaacaatgctcatgttatacacctcacgatttgtttttagtaaaacgttttaccaatgccatcgtaccatttttatttgcaaaatgcatgcgttttcataaaaactgaaaacgtttaaatcatatttaaaaattcatacattattattttaatttcttagtgaaataattatgattaaaaaccctcagcattaaagcaacgctaagggcctaacaatgatgagtatatttcggaagatacgtagttagtttgaaagatgatagccagttgttgcacgaatttttaaagtcgttggtaattcaatcatatcaatggatttatctaagtgctgtaatcgttgaagtaataaggttaaagatgttttgccaatatcagttataggttgtgccacagtagttaaaggtggcgagacgtacgctgcataatcaatgtcgtcataacctattaatgagatatctttcggaatactgatgccatgttcaattagtcctcgtaaaatgccaatagcgagttcatcgttaatagcgaagattgcagtggcagattgaaccatgatgtcatcaacaatggttagcccaccgcgcttagataattcagtatggacgatttgtggttctggcaattgattcgcgcgcaaagtatcgacaaatccagcgacacgagtcgacatattcgccatcatgtcatatggtgcaacaattatcatattgttgtgaccgagttctattaaatgttgtgctgcaagttgtccaccttgatattcatttgtccgaacaaaatctgtatagccttgatggtcattttgatccagtacgacataaggtacatgatgtttctttagatagttatttagggcgtccggggatgatatgtattgtgcgataattaatccgtcaatacctcgatcaattaaatgtttaatattgtcatacaaatcagttgctgtagatgttaaaaagcataaatcaacatcagatggtttatggtcatgaatactttgcatcagtgctgagaaaaacggatttgttaagctaggtaaaatgacgccaatagtttgaattttactgccgcgcaattgttttgcatgtttattaggggcatagcctaaacgttctgaaacagcatgtacgttttttatcgttgttgcggaaaaacgactatcattatgatttaaaatatgtgacacagttgtaactgatacaccagcttctctagcaacatctttaattgacacttttttcatattatattccttctctttattgtgtaattaatcatacagttatatacccgattattatattcatcatatcatgataaacattggatgacatatgaagacgtgcatgacttttattgtctacaaacagacgcctatagtatgcgattaaggttgaggcgagagaatatattattaaggttaaataacttttaatgattatgataacaagaattttaaaatgtttattgtgatgaaaaatacaaaagtcattattttaaagaataaaatatttgtttttgaaaaaagtattaaaaaacataacgaaatgatgtatattgaactatgtgattgaaaaaatttttaattaaggcttgttaaaaattaagagaggatgtttttaaatgcaattcaaattaaaagaagaagagattattagttttttagaattgaaatatccagaaaaagagttcgaatatggtcgtttgttagttggacaacataaacgtgatgatttagatgtttattactttggtgatacgtttttaatgtgcacgattatttcattcaaaacatttgaaattaaagaaacagtagaattatcatatgatgctgttaatcgtattgtgttaaaagatggatggttatttagaaaaatgagaatagaaacaatgcaaaaagtgttaaaatacggtacttctaaattaatgttaactgattttcaaaaggacaattataataaatatattcaaggtcagaaacaacgcgtgatatttgaaaatggccattttgtctaattgatagtgaatataattagagtaagaggctgggacataaatccctaaaaaacagcagtaagataattttcaattagaaaatatcttactgctgttctctatttatacaatacttcgtattgaatggcttcgctttcctagggtgccgtctcagcctcggtcttcgactggcactgctccctcaggagtctcgccattaatactacgtattaacatgtaattttactttgaaatacttttaaaaaataagacactttgcccaacttacactaccaatagaaacttctgttagaattcctcaaaatgatatttcgcgacatgttaatgaaattgttgaaacgatacctgatagcaaattcgatgaattcagacatcatcgtggcgcaacatcctatcatccaaagatgatgttaaaaatcatcttatatgcatatactcaatctgtattttctggtcgtagaatagagaaattacttcatgacagtattcgaatgatgtggttagctcaagatcaaacaccttcttataaaactattaatcgttttagagtgaatcctaatactgatgcgttaattgaatctttatttattcagttcgcttatttttcttgaatttcttgtatatcattttaaagtgatatagatatttcgaaacataattcttctattatatttaagatttaaccgtttttggaatgatcatgtatgcagacaatgagccgagtatcattaatacaatgctgacgataaatgttacagttgccgctacacttggtgcatagtttagttgtaatatactgaaaactgtagtacttagtgctataccaaaggcgccacctaatgtaccactcattttatataatcctgtagctaaaccaactttttcatttggcatactgaaaattgcaattgtaaggccgggtgttgcgactaaaccatttccaattgcgcaaatgacaaacccaataacaacagcaatgatatattgtgatggttgaagtgatgtcatgctaataatagtgatgccgatgacagggaacaacggaccaatgatgagcatcaatttgccaccgaaacgtaatgttgctttttcacctaaacgaatcatcgcaactgccacaatggcatatggcaatgtaacaagtccagattgcgcagctgataaaccaaggtgtgtttgagcatatatgaaaaagaccactgttacgcctagaccgctatttaaaacaaagttatttaaaaatgcaccaatgaacggacggttgcgtaatactgagaaatcaataaaaggtacttcatgtcgacgttcgatgatgatgaatatcaacgtagtgatgataaaaatgctcagacaaatgattgaaaatgtactaaaccaaccttgttcgaatccttgtgttaacaataatgtaaagctaccaatcataacagcgaaaatcgacatacctttgtaatcgaatggatgacggtggctatgttgacttactttttcaggtgtgccttttagaagcaatatggcaatgaaagcaatgactatactaatgatgaaattcgtttgccatccgaaatttgaggcaattaaaccgccgataacaccagctaggccgatgccaccaacagtactaatcattagataactaatcgctcgtcttaaatgttctcctttaaattgattatttaacacgccaactgttgaaggtaacaagatagctgctgatagaccttgtaaaattctaccgatgatgagcagtgcagtgatgtccgatataattaatagaagagatgcaaacatactgattatgagacccatgtatgtcattctcagttgtcctattttatcagcaatatcacctgcagccaccatgaagatacctgtggcgaaggaagttaaactaatagataaatttaacacggcaggagaggtttgatacgtttgaccaacgagaggtcctatattaataaatgattgtgcaaacaaccaatatgttaatgcagacaacataatcgcaataataatattactgcgtggtgaagattgtgtgttattcacagatgtcactccttgtaaaaattaaatatagaaagtcatgagatgaagtgaacggatgtatagatgatcgttcactcacacataagtcatgatttccttacatatcataccacagttattgagaatgaatatcaattaattgcttgtataattgattttttatagtatgtttaagtgaaacagctttatttgaaagtgattaaagtaaatgaaggtacagaggagtgagaacaatgtgcacaggattcacaatacaaactttaaataatcaagtacttcttggacgcacgatggattatgattatccattagatggttcgccagcagtgacgcctagaaattatcgttggaaatctcgcactggcacgacaggccaaacgcaatatggctttattggcacaggaacagatatggaaggttttatttatggtgatggtgttaatgaacatggcgttgccatttcaacacaatatttccgaggttatagttcatatggatcaacacacaaagcggacgcgatgaatattacgcaaaatgaaattgtgacatggattttgggatatacaacaagcattgaagatatgaaacaacaagcatcccaaatacatgttgtagctgtatatttaaatgacatcggtgaagttccgccattgcattatcatgtttccgatgcaactggacatacagtcgaagtttcatttaaagagggtgaagtggttataaaagataatcctattggtgtcttaacaaatcatccagacttaaattggcattatagtaatttaagacaatatatcaatatttctccttatccagcaacagcaaatttattggaaggtgtaacgattgaacctttaggcaatgaagcaggtacatttggattgccaggtggatttacttcaactgagcgctttgtgagaatggcatttatgaaagcaaacattgctcaaaacaatgataaagaaatggatttaatgaatgcattttatttattagatgcggtaaatataccgattggaattgtacgtccgcatgatgctgacaatcactatacgatgtatcagaccgtaataaatttaactacaagaacgttatatattaagtattatggcagcaatgaattagtagcattaaagctcacagatgatttaattaatagaaaagatatgacgatttttaagcctgagaagcatatcattattagaaagttgaatgacaatcaatagcgattgataatggaatttggttgatatgatttgatggatgattactatcatacattagcgttgaagcgcgaacatggacgaatgattagttgttagttttgaaaatttataaaaggttaaacgaatgcagtgagagatgtcattttaatatcaatgtatggctattttgtaatgacaatgtaatgagtttagtaaaacatttcgggaatattaaatagttggaaaatgagaattaaatcctttactcagttgtctaattcttttagtatgtgcagtacagtttaattgaaaactaactttaactttaatggaggatgttttatacatgaaaaaattaacagcagcagcgattgcaacgatgggcttcgctacatttacaatggcgcatcaagcagatgcagcagaaacgacaaacacccaacaagcacatacacaaatgtcaacacaatcacaagacgtatcttatggtacttattatacaattgattctaatggggattatcatcacacacctgatggtaactggaatcaagcaatgtttgataataaagaatatagctatacattcgtagatgctcaaggacatacgcattatttttataactgttatccaaaaaatgcaaatgccaatggaagcggccaaacatatgtgaatccagcaacagcaggagataacaatgactacacagcgagtcaaagccaacagcatattaatcaatatggctatcaatcaaatgtaggtccagacgcgagctattattcacatagtaacaacaaccaagcgtataacagccatgatggtaatggaaaggtcaattcccctaatggcacgtctaatcaaaatggcggatcagcaagtaaagcgacagctagtggtcatgcgaaagacgcaagctggttaacaagtcgtaaacaactacaaccatatggacaatatcacggtggtggtgcgcattacggtgtcgactatgcaatgcctgaaaattcaccagtttactcattaactgatggtacagtagtacaagcaggttggagtaactatggtggtggtaatcaagtaacgattaaagaagcgaacagtaataactaccaatggtatatgcataataatcgtttaactgtttcagctggtgataaagtcaaagctggtgaccaaattgcatattcaggtagtacgggtaattcaacagcacctcacgtacacttccaacgtatgtctggtggcatcggtaatcaatatgcagtagacccaacgtcatacttgcaaagtagataatacagtaaatcccaagttacgatatcatacgcaacttgggattttttcgttttaataataggtataagcccattgcttgtcctctaagacatgttgataaaaaggatcttggccaattaacttgatatcatctgcaagtgcttcaacttcatctaaatgatgggtagttaatataattaaacatttagatttcatgatgttaagtagttggtggatgtcatgtctagattttaaatcaataccaactgtcggttcatctaaaatgagaattcgaggttgacctagtaaacctactaatatattaattttacgtttattcccaccggacaatgtagatactttggcagacgtatcatcaaaatttaattgctgtaaatattcgttgatagttgtatcgttaattggatttttacaaagtgatttaaaaaatttaatgttttcagccactgtcatgtgttcaaataacgcaatgtcttgtggcacataaccgatgtgattttgtatttgtctttgattccatttttcgtcgaaatagttgatagttccatcattagctttttcaataccagcaatcatacgaagtaatgttgattttccagcgccattatcgccaagtaatacggttaaacgattactatcaaaggacatggttaaatgattgaaaatctgtttgttacggtaacgctttgaaaggttattaatttctatcatcagttacgctcctttacatgaaaataatcaagtatacgatacccatagcaagtgcatatataaatgtcatgaataatcgatgacttattgtttgaatatggaataagataaagacgatacctatctcataaatcaatataagtaacagtgattttaagtaaaatattaagctgagtggttgagacaaatatagactaactgccaatagtaccaacaataacaagatcgtatgtgtcattacataagtactatatagtttgaaacggcttaaatgatattgtgataatcgttgcaatgctgcttgttggtttaaacgataatgaagtactacttgaacagcgctaacaaataaaatcaccgcaaagattaagctaattgaaatagagtgttgtgcttgtttagtaagcgacacaaatttgattttagattcaggtgtatgtttatgataggacttgttgatagcatcgatggattgatgctgtttcatatcctcaaagtgttcataaataatgttaggaatttgctgttcatataatgaactactaacaatttctacagcaataccacctataaagtcatctctaccatataactgtatcgtttcttttaaacggttctcttttaatttttgagagaaacctttaggaatttgcatacttaaaatagcttcctttttagtaacatcatcttcaatatagctttcatcttcatcgacttttttaatagttacatagtcagattgtttaattttattgacgaatgattttgatgcagtggtttggtctaaatcttgaatggtaatcggtattttgaagttgtcatgtgctacacggtaaccgataccaataagtacgagtgcgatgacaatggttgttacgagcaagatgtattgtaaccattgcttgaacacaacaagttgtatataaggcttcattgacgatacctccaaaccaatacagctaaattaattatcaaaagtgcgatgaagctaagatagaaactagggtgtagttctaaaatgtagttgtttaaaataatttctaacaattgatttgttacaactgcgaacggttgaatattgaaaacgccatttgctatatgttgtaaaaaaatcgtaggtattgttaaaccagataacaccaggatgacaatagctaatatgactttactaatactattcaacaagcctgttgttaaaagttcgatgagtaataaccacagtattaaaaaggtaacataatagcttaaatgaatggctaacgttggccaattatataattcaaaggtattcggaatactgaacacaatccaaactacaccaacgatactccataacatagtataaaaccatgtaatcaacgcacgaatgattaataaacgctctttagaaaaatgaaacattttcaatcgcgctttcaatacagtatcttgattcattttcaaaactgtaaataaagatagtgcaaagatgaaaaccgttgctaaaaatcctgtaattgcataataactgcccgtatcgtataaatgaatcggttctaagttaaatgcacctgaacggtttaatcctgtaatcagcaaatcagtcataacattgatactgtcagaatgtgatgctttcggtgctaagtcttgaaaagctaagatgccacccattgatcgcataagacgttggtaaacagaatctgttagctgagatagcacgacacttttcatggattgttgatcatatgtatatactgaaattggtagttcgccttgtttataaaatgccttggtcatacctttatcaaaaacaaaatagccttgaagtttatgtttttttaacaaagtatgtgcttgcttatcatcatatgccttaatgctcacgttttttcctaggttactccctttaccaatagagtttaagattaatttcgtttcacttgattgatctttatctacgacacctatattaaaatgattgtcatcttctgttacatgttggatcgtcgttaatgtaataacgagtgccgctaatataaatagtaaatagataatcaaataccactttttcaataaaaaagagtggtagatgcgaaacaaatgtattgttttcatttaaccactcctccaatgataagattgaaaggcaagatgaccttccaatcttatttttatattttagttatttagatgccttttttaaaattgattcaaacattttgccgccatttttttcgatttctttttcaagtttttcacggtcttttgaagatagactattgaaatctttcgcaccactatcatcaaaatcaatatctgctttcaattttgtgctagattttaaaatgaaattaattggttcttcagcatatttgatgccgatatttaacgtagatttctgagtgttattttttacgtcagaatctatattattttcaaaagtgaattcattttcgtcgctatatttatctaatgcgacagtaattttacctttatcttgacgttttgtgccatctactttttcttggttatctaatttgatttttgattcatcatattctgtctttttaccaaattcgtatttatcactgtatttattgtctttttccttagaagatacgcctttaattgtatatttcgcttcagcatacgtgtatttatcttgatcgaaatcaagtgcgtaatctagttttaacttatcgtcttctaaagtattagtacctttgattttagttttattattttctttgtctgtaatagtaatttctcgttttacaatcgtatgtttttcggtataaattttagattgaattttagcaaattcatcctttttagtttctttgacatcgtcaattgcttttttgatgtctttttcaaagtcttttgtagcaccttgttcttccattaattttttaaggtctttatcctttttagcttcttctaatacagctaatgtaatttttttagtgtcagctctgctaagtgttaacgtgacaggtctaactttgtacttttcaccattaaccttaatttcttcttttttacctttatcaaaattatcgtcatctaatttgtcgacaataagttcggaatatttttcggcaattttgctgtagtcactttgttgtgcttgagcattactaaaaagagtatttaaatttagttgttggtttgtaataccattttcttttgctgtttcttcatcttcacctgtaagttttgaataagttgataataaatcagaattattaacactatatttccctttaaataatggtgattcgaaataatgcttatctttatctgcagctaactggaatttccctaattcagagtctgctattgttggttcaagattaatcattgatttctcttttttaggatcatgtccatatgacattttaattttcgaagcattaacaacagatttaggaataccaagccccttaacaatttcatctgatgcatctgcgcttaattctaatgaagataaaaatgaattatctttcatcttttcttggaacttcacttcgttttcaaaacggtcattaaaataatctttatacatttttgcagtttgttgttcgctttttaagtatgtatttttcggtgtgtttgcaaaaaatgcataaactccccatgcgattccacctattaataataagacaataataataggaattataatttttaactttttagacattttgcttcctcccaattatttatgagttaatcatatcagaacaatacattttattaaatggtttattttaaattttgtttaaattaatagaattttagttataataatgtttaataagttattgaaaatctaataaactacaaaaaatagtttgattacataatgattcttgaaaatgtcggttaacttaaaggtgacaagttattgcaattttgaaggtaaacatcatatttaataatcgaataacatacaaaataaagcgaccaattttgcagtgttacgaattgtaaactgcgaactggtcgctttttattgatgtcatgattaatttaatggatgtaattatatgatgaaacttctgaagcagagatggttcttgatgaaacgatatattcaccaatccagttcatttctgaaattagaatacttccatcaatattaactttttcaacgtaggctacatgaccaaatggaccatttactgtttgtaaaattgatcctcgtgttgggtgtctatctactttgaagccattgcttgaagcttggcctgcccagtttttagcatctccccaaaatgtactaatcgtgtgtccatctttggcacgtttatcaaagacataccatgtacattgtccagcagtatataagttgttcttacttgtgataagaggctgatcaatgattttaccgttacctaatgctaaaggtttaccgtcagcagtctttgctttgtcattaaattcggcgatttgtaattcgtcatacaattcgtctaaatcgatgcctgtaataagccctttgttatcttttgaaaaagcgttatttaattcatcgtcattgtcttcgacattcggtattgctggtgtcaaaggattgcttggtgacgtttgaggcggtgtgtgtgaatcaattgcgtcattaatgtgcgtatactgaccacttaatgaagaatggtactgattgttgttaaaatcacgttgatttgcgtgttgatgattgtcgtttgtacgtgactggttttgatgattgttgtttggcgtgttgtttttgtcatatgtataagtatacgcgccggtgtctttattcactttgaactgtgcgtttgggtgtgctctctttgcttcttctaatgttttgctatcattcgtatatgcttgagccgagttaggcgacatactaaataaagtaagagttgtcatcgtcagtaaaattgttttcttcataataaccatttaatcctttatgtatttaatttaattttagtatacacatttatattacaaaaatgaatggttaattaaaaatatatgggtatattcaatatatttatttaaaaaaagctaaaaatacttaaaaaactatatacatatactaataatttatatattatttgagtaaggaacactttttcaaaaaaatagtgtccctaaaaagttttgataaacttaaaatattcaggaggtttctagttatggcaatgattaagatgagtccagaggaaatcagagcaaaatcgcaatcttacgggcaaggttcagaccaaatccgtcaaattttatctgatttaacacgtgcacaaggtgaaattgcagcgaactgggaaggtcaagctttcagccgtttcgaagagcaattccaacaacttagtcctaaagtagaaaaatttgcacaattattagaagaaattaaacaacaattgaatagcactgctgatgccgttcaagaacaagaccaacaactttctaataatttcggtttgcaataagcattctgaaattggcaaagtcacattttctaatgtggctttgcttatcattttttaagaaaacaactgaaaggaaataagcatgaaaaagaaaaattggatttatgcattaattgtcactttaattattataattgccatagttagtatgatattttttgttcaaacaaaatatggagatcaatcagaaaaaggatcccaaagtgtaagtaataaaaataataaaatacatatcgcaattgttaacgaggatcaaccaacgacatataatggtaaaaaagttgagctgggtcaagcatttattaaaaggttagcaaatgagaaaaactataaatttgaaacagtaacaagaaacgttgctgagtctggtttgaaaaatggtggataccaagtcatgattgttatcccagaaaacttttcaaaattggcaatgcaattagacgctaaaacaccatcgaaaatatcgctacagtataaaacagctgtaggacaaaaagaagaagtagctaaaaacacagaaaaagttgtaagtaatgtacttaacgactttaacaaaaacttagtcgaaatttatttaacaagcatcattgataatttacataatgcacaaaaaaatgttggcgctattatgacgcgtgaacatggtgtgaatagtaaattctcgaattacttattaaatccaattaacgacttcccggaattatttacagatacgcttgtaaattcaatttctgcaaacaaagacattacaaaatggttccaaacatacaataaatcattattgagtgcgaattcagatacgttcagggtgaacacagattataatgtttcgactttaattgaaaaacaaaattcattatttgacgagcacaatacagcgatggataaaatgttacaagattataaatcgcaaaaagatagtgtggaacttgataactatatcaatgcattaaaacagatggacagccaaattgatcaacaatcaagtatgcaagatacaggtaaagaagaatataaacaaactgttaaagaaaacttagataaattaagagaaatcattcaatcacaagagtcaccattttcaaaaggtatgattgaagactaccgtaagcaattaacagaatcactgcaagatgagcttgcaaataacaaagacttacaagatgcgctaaatagcattaaaatgaacaatgctcaattcgctgaaaacttagaaaaacaacttcatgatgatattgtcaaagaacctgatacagatacaacatttatctataacatgtctaaacaagactttatagctgcaggtttaaatgaggatgaagctaataaatacgaagcaattgtcaaagaagcaaaacgttataaaaacgaatataatttgaaaaaaccgttagcagaacacattaatttaacagattacgataaccaagttgcgcaagacacaagtagtttgattaatgatggtgtcaaagtgcaacgtactgaaacgattaaaagtaatgatattaatcaattaactgttgcaacagatcctcattttaactttgaaggcgacattaaaattaatggtaaaaaatatgacattaaggatcaaagtgttcaactcgatacatctaacaaggaatataaagttgaagtcaatggcgttgctaaattgaaaaaggatgctgagaaagatttcttaaaagataaaacaatgcatttacaattgttatttggacaagcaaatcgtcaagatgaaccaaatgataagaaagcaacgagtgttgtggatgtaacattgaatcataaccttgatggtcgcttatcgaaagatgcattaagccagcaattgagtgcattatctaggtttgatgcacattataaaatgtacacagatacaaaaggcagagaagataaaccattcgataacaaacgtttaattgatatgatggttgaccaagttatcaatgacatggaaagtttcaaagacgataaagtagctgtgttacatcaaattgattcaatggaagaaaactcagacaaactgattgatgacattttaaataacaaaaagaatacaacaaaaaataaagaagatatttctaagctgattgatcagttagaaaacgttaaaaagacttttgctgaagaaccacaagaaccaaaaattgacaaaggcaaaaatgatgaattcaacacaatgtcttctaacttagataaagaaattagcagaatttctgaaaagagcacgcaattgctatctgatacacaagaatcaaaaacaattgcagattcagttagtggacaattaaatcaattagataataatgtgaataaactacatgcgacaggtcgagcattaggcgtaagagcgaatgatttgaaccgtcaaatggctaaaaacgataaagataatgagttattcgctaaagagtttaaaaaagtattacaaaattctaaagatggcgacagacaaaaccaagcattaaaagcatttatgagtaatccggttcaaaagaaaaacttagaaaatgttttagctaataatggtaatacagaggtgatttcaccgacattattcgtattattgatgtatttactatcaatgattacagcatatattttctatagttatgaacgtgccaaaggtcaaatgaatttcattaaagatgattatagtagtaaaaaccatctttggaataatgtcattacgtcaggtgttattggtacaactggtttggtagagggattaattgtcggtttaattgcaatgaataagttccatgtattagctggctatagagcgaaattcatcttaatggtgattttaactatgatggtctttgtacttattaatacgtatttactaagacaggtaaaatctatcggtatgttcttaatgattgctgcattgggtctatactttgtagctatgaataatttgaaagcggctggacaaggtgtgactaataaaatttcaccattgtcttatatcgataacatgttcttcaattatttaaatgcagagcatcctataggcttggcactagtaatattaacagtacttgtgattattggttttgtactgaacatgtttataaaacactttaagaaagagagattaatctaatgttgatgaatagcgtgattgctttaacttttttaacagcatctagcaataatggcggacttaatattgatgtgcaacaagaagaggaaaagcgaatcaataatgatttaaatcaatatgatacaacgctatttaataaagatagtaaagaagtcaacgacgcgattgctaagcagaaaaaagaacgacaacaacaaataaaaaatgatatgtttcaaaatcaagcgagtcactcgactcgcttgaatgaaactaaaaaagtgttattttccaaatctaacttagaaaagacttcggagagtgataaaagcccctatattcaaaacaagcaggagaaaaaaatattcccgtacattttgatgtctgtaggggcttttttgactttaggatttgtcattttttcaattcataaagggagacgaacgaaaaatgaatcagcacgtaaaagtaacatttgattttactaattataattacggcacatatgacttagcagtaccagcatatttaccgataaaaaatttaatagctttagtattggatagtttggacatttcaatatttgatgtcaatacacaaattaaagtgatgacgaaaggtcaattacttgttgaaaatgatcgactcattgattatcaaatcgctgatggagatattttgaagttactataggaggaaaaatagatggttaaaaatcataaccctaaaaatgaaatgcaagatatgttaacgcctttagatgctgaagaagcagctaaaacaaaattacgcttagatatgagagagattcctaagtcttcaattaaaccagaacattttcatttaatgtacttattagaacaacattctccatattttatagatgctgaattaactgaactacgtgacagtttccaaatacattatgacattaatgacaatcatacaccttttgataatattaaatcatttactaaaaatgaaaaattacgatacttactcaatatcaaaaatttagaagaagtaaatcgtacacgttacacatttgttttggcaccagatgagttatttttcacaagagatggattaccaattgctaaaacaagaggtttacaaaatgttgttgatccattaccggtgtcagaagctgaatttttaacaagatataaagcactggttatctgtgcattcaatgagaaacaatcatttgatgctttagttgaaggaaacttagaactacataaaggaacgccatttgaaactaaagttattgaagcggcaacgttagatttactaacggcatttttagatgaacagtatcagaaacaagaacaagattatagtcaaaattatgcatatgtacgcaaagtagggcataccgttttcaaatgggttgctatcggtatgacaacgttaagtgttttattaattgcattcttagcctttttatatttttcagtaatgaagcataatgagcgcattgaaaaaggataccaagcatttgtaaaggatgattatacgcaagtactaaatacgtatgatgatttagatggtaaaaaattagataaagaggcactttacatttatgccaaaagttatatccaaacaaataaacaaggtttagaaaaagataagaaagaaaatttacttaataacgtgacaccaaattcaaacaaagactacttattatattggatggaattaggacaaggacatcttgatgaagcgattaatattgccacttatttagatgataacgatattacaaagttagcgttgattaataaattaaatgagattaaaaataacggagatttatcgaatgataaacgttctgaagaaacgaaaaagtataacgataaattgcaagatattttagacaaagaaaaacaagttaaagatgaaaaagcgaaatctgaagaagagaaagcaaaagcaaaagatgagaaattaaagcaacaagaagagaacgaaaagaaacaaaaagaacaagcacaaaaagataaagaaaaacgtcaagaggctgaaagaaaaaaatagtataggactgaggcaaagacaatgcataaattgattataaaatataacaaacaattgaagatgctcaatttgcgagatggtaagacatatactattagcgaagacgagcgtgcagatattacgttgaaatcgttaggcgaagtcattcatttagaacaaaataatcaaggtacttggcaagcgaatcatacttctattaataaggtgcttgttagaaaaggtgaccttgatgacattacattacagctttatacagaagctgattatgcatcatttgcttatccttcaattcaagatacgatgacaattgggccaaatgcgtatgatgatatggttattcaaagcttgatgaatgccatcattattaaagattttcaatcaatacaagaatcacaatacgtacgcattgtgcacgataaaaatacagatgtgtatattaactatgaactacaagagcaactaacgaacaaagcttacattggtgatcatatttatgttgaagggatatggctcgaagtacaagctgatggtttaaatgtattgagtcagaatacagtggcatcgtcattaattcgcttaacacaagagatgccacatgcacaggcagatgattacaatacgtaccatcgttcgccaaggattattcaccgtgaaccgaccgatgatattaagattgaaagaccaccacagccaatacagaagaacaatacagtgatatggcgttccattataccgccattagtaatgattgctttaactgttgtcatctttttagtgagaccaattggtatttatattttaatgatgattggtatgagtacagtaacgatagtatttggtattacaacgtatttctctgaaaagaaaaagtataacaaagatgttgaaaaacgagagaaagattacaaagcttatttggataataaatctaaagaaattaataaagcgattaaagcacaacgttttagtttgaattaccattatccaacggttgctgaaattaaagatatcgttgaaacgaaagcaccaagaatatatgaaaaaacatcgcatcatcacgatttcttacattataagttaggtattgcgaatgtagaaaagtcattcaaattagattaccaagaagaagaatttaaccaacgtcgtgatgaactattcgacgatgctaaagaattgtatgaattttacacagatgtagaacaagcaccattaatcaatgatttaaatcatggaccaattgcatatattggtgcacgacatctcattttagaagaattggagaaaatgctaatccaattgtcaacattccatagttatcatgatttagagtttctatttgtgacacgtgaagatgaagttgaaacattgaaatgggcacgttggttgccacatatgacattgagagggcaaaacattagaggatttgtttacaatcaacgaacacgtgaccaaattttaacgtcaatctatagcatgatcaaagaacgtatccaagctgtgcgtgaacgcagcagaagtaatgagcaaattattttcacaccgcaattagtgtttgtcattacagatatgtcattaattattgatcacgtcattttagaatatgtaaaccaagatttatcagaatatggtatttcattaatctttgttgaagatgtgattgaaagtttgccagagcatgtagataccattattgatatcaagtctcgtactgaaggcgaactgattacaaaagaaaaagaattagttcaattgaaatttacaccggaaaatattgataacgtcgataaagaatatatcgcgcgacgtttggcgaatttgatacacgtcgaacatttgaaaaatgcaattcctgatagtattacatttttagagatgtataacgtgaaagaagtagatcagcttgatgtagttaatcgatggagacaaaacgaaacatacaaaacgatggcagtacctttaggcgtaagaggtaaagatgatattttatcattgaacttacatgaaaaagcacacgggccacatggtttagttgctggtaccactggttcagggaaatctgagattatccaatcatacattttatctttagctattaattttcaccctcatgaagttgcattcctattgattgactataaaggtgggggtatggcgaacttatttaaagatttagtccatctagttggtacgattacaaacttagatggcgatgaagcgatgcgtgccttaacatcaatcaaagccgaattgagaaaacgtcaacgtttattcggagagcatgatgttaaccatattaatcaataccataagttatttaaagaaggtgttgcgacagaaccaatgccacatttattcattatttccgatgagtttgccgaattaaaatcagaacaacctgattttatgaaagaacttgtatcaacggcacgtattggacgttcgttaggtattcatttaatacttgcgacacaaaaaccatcgggtgttgttgatgaccaaatttggtctaactctaaatttaagttggcattaaaagtacaagatagacaagacagtaatgaaattttaaaaacaccagatgcagcagacattacattaccaggtcgtgcgtatttacaagttggtaataatgaaatttatgaattgttccaatctgcatggagtggagcaacatatgacatcgaaggcgataaattagaagttgaagataagacgatttacatgattaatgactatggtcaactgcaagcgatcaacaaagacttgagtggacttgaagatgaagaaacgaaagaaaaccaaactgagttagaagcggttatcgatcatatcgaatctattacaacacgattagaaattgaagaagttaagcgtccatggttaccaccattaccagaaaatgtatatcaagaagatttagtagaaacagattttagaaaattatggtcagatgatgcaaaagaagtggaattaacattaggacttaaagacgtaccagaagaacaatatcaagggccgatggtattgcaattgaaaaaagctggtcacatcgcgttaatcggaagtccaggatatggtagaacaacgttcttacacaacattattttcgatgttgcaagacaccatcgtcctgatcaagcacacatgtacttgttcgatttcggaactaatggtttgatgccagtcacagacataccacatgtcgctgattactttacagtagatcaagaagacaagattgcgaaggcgatacgtatatttaatgatgaaattgatcgtcgtaagaagattttaagtcagtatcgtgtcactagtatttctgaatatcgaaaattaactggtgaaacaattccgcatgtctttattcttattgataactttgacgcagtaaaagattcacctttccaagaagtttttgaaaatatgatgattaaaatgacacgtgaagggctagcattagacatgcaagtaaccttaactgcctcaagagctaacgctatgaaaacaccaatgtacattaatatgaaaacgcgtatcgccatgtttttatatgataaatcagaggtgtcgaacgtagtaggacagcaaaaatttgcggttaaagatgtagtgggtcgagcattgttaagtagcgatgacaacgtatcattccatattggccaaccatttaaacatgatgagaccaaatcatataatgatcaaattaatgatgaagtatcggcgatgacagaattttataaaggtgaaacaccaagtgatattcctatgatgccagatgaaattaaatatgaagattacagagaatcattaagcttaccggatatagttgcaaatggtgctttaccaattggattagattatgaaggtgttacactacaaaaaattaaattaactgaaccagcaatgatttcatcagaaaatccgagagaaattgcgcatattgctgaaattatgatgaaagaaattgacatattaaatgaaaaatatgcgatttgtatcgcagactcaagtggagagtttaaagcttataggcatcaagtggctaactttgccgaagaaagagaagacattaaagcgattcatcaactaatgattgaagacttaaaacaaagagaagtggacggcccatttgaaaaagattcactttatattatcaatgattttaaaacatttattgattgcacgtatattccggaagatgatgttaaaaaacttattacaaaaggaccagaacttggcttgaacattttatttgtcggcattcataaagaattaatagatgcttatgataaacagattgatgttgcacgtaaaatgattaaccaatttagtataggtattcgtatttcagaccaacaattctttaaatttagatttattcaacgagaacctgttattaaagaaaatgaagcatatatggtcgcaaaccaagcttatcaaaagattagatggtttaaatagcaatgaattaaataggagggaggtatgttatgaattttaatgatattgaaacaatggttaagtcgaaatttaaagatattaaaaagcatgctgaagagattgcgcatgaaattgaagttcgttctggatatttaagaaaagctgaacaatataagcgattagaatttaatttgagttttgcactagatgatattgaaagcacagcaaaggacgtacaaactgcaaaatctagtgctaataaggacagtgtaactgttaagggaaaggcgcccaatacgttatatattgaaaaaagaaatttgatgaaacaaaagcttgaaatgttgggtgaagatatcgataaaaataaagaatccctccaaaaagctaaggaaattgctggcgaaaaggcaagtgaatattttaataaagcaatgaattaatattgaggtgaagatatgggtggatataaaggtattaaagcagatggtggcaaggttgatcaagcgaaacaattagcggcaaaaacagctaaagatattgaagtatgtcaaaagcaaacgcaacagctcgctgagtatatcgaaggtagtgattgggaaggacagttcgccaataaggtgaaagatgtgttactcattatggcaaagtttcaagaagaattagtacaaccgatggctgaccatcaaaaagcaattgataacttaagtcaaaatctagcgaaatacgatacattatcaattaagcaagggcttgatagggtgaacccatgatgaaagatgttaagcgaatagattatttttcttacgaagaattaacaattttaggtggtagtaaattgcctctcgtaaattttgaattgtttgatccatcaaattttgaagaagctaaagctgctttaattgaaaaggaattagtaacagagaatgacaagttaactgatgcaggttttaaagtggcgacattagtaagagagtatattagcgccattgtaaatattcgaattaatgatatgtattttgcaccatttagctatgaaatagatgaatatattttgttaagccggtttaaaaataatggatttcaaatacgaattataagtaaagacattgcatggtggtcgattgtacaatcatatcctttattaatgagacaagaaaagtccaatgattgggactttaaacaaattgacgatgaaacattggagaacttaaataatgaaagtatcgatacgattgagcgtgtgttagaaattgaaatctacaatcatcaaggtgaccctcaacaaagtttatataacatttatgaacaaaatgatttgctactcattcgatacccattaaaagataaagtactgaatgttcatattggtgtcattaatacatttatacgagaattatttggattcaatactgatgaaaatcatattaataagacagaggagtaatgacgttgagtgggaaaattagtgttaaagctgaaacgattgcacatgttgtaaaagaattagaaagcattagtcaaaagtatgatgaaatagctcaaaactttggaaaaatagcgcaattaaattattacagtagtgaaaaagctgcacattctatggaaaatggctatagtagtgctgcaacagtcattagtggtctcaaaggtccactgagcacactcggtggtggcgtcatgaattcagcacaaaagttctttgaagcagatgaacattggggtacggaatttgccaagctttactataatattgagggataggtgcatgacatgacaaaagatattgaatatctaacagctgattatgacaatgaaaagtcatctatccaaagtgtaatagatgcaatagaggggcaagacttcttagatgtagatacaacaatggatgatgcggtaagcgatgtcagttctttagacgaagatggcgcaatatcattaacaagtagtgtagtaggtccacaaggatctaaattaatgggttattatcaaaatgagctatatgattatgcatctcaattagattcgaaaatgaaagaaattattgacacgccatttatagaagatatagataaagcattcaaaggtataacgaatgttaaattggaaaatatattaataaaaaatggcggtggtcatggtagagatacctatggggcttctgggaaaattgcaaagggagatgccaagaaaagtgacagcgatgtttatagcatcgatgaaatattaaaatcggatcaagaatttgtaaaagtaattgatcagcattacaaagaaatgaaaaaagaagataagaaattatctaagagtgattttgaaaaaatgatgactcagggcgcttcttgtgattacatgacagtagctgaagcggaagagctagaggagcaaaagaaaaaagaagaagctatagagattgcagcactagctggtatggtagttttatcttgtattaatcctgttgctggagcagtagctattggtgcttattccgcctattcagcagcaaatgcagccacaggaaaaaatattgtaactggaagaaagctatctaaagaagaacgaatcatggaaggactttcgcttattccattgccaggtatgggcttcctcaaaggtgctgggaaaagtttaatgaaattaggcttcaaaggcggagaaaaatttgcagttaaaacaggattgcaaaagacaatgcaacaagcagttagtcgtatttcacctaaaatgggaatgatgaaaaacagtgtgttgaatcaatctcgtaactttgctcaaaatactcatgttggacaaatgctgagtaacatgcgtggtcaagcaactcatactgttcaacaaagtagaaattggattggacaacaagcacaaaacgtcaagcgaatagtgaataatggacttgataaagaaatagcacatccatttaaacaacaacttgcaccagcgggaatgggtggtataaaatttgctgaaacaactactttgagaaacatgggtcaaaaaatgaaacgtgctgttacaccacaaaatcacgtgacacatggtccgaaagatagtatggtgagaagtgaaggtaaacatagtgtaagtagccatgaaataaattcatcaaaatatgttgaatcaccaaactacaccaaggttgaattcggagaacactatgcaagacttagacctaagaaactaaaagcaaatatagaatatacaacaccaactggtcacatatatcggaccgatcataaagggcgcataaaagaagtttatgtagacaatctttctctaaaagatggcggtcgtaataaccatgcacaaagaactgtggggggagaggatagattaccagacgatgatggaggtcacttaatcgctagaatgtttggtgggtcaaaagacatagataaccttgtagcacaaagtaaatatatcaaccgttcatttaaggaaaatggtgattggtacaagttggaaaaactatgggaaaaggcaatcaagtctggaaaaccaatagaaaatattaaaatagaagttaaatataaaggtaatagtcaaaggccaactatatttaaggttggatatgagattaataatgaacgaaaagttaaaacaatagaaaatatatagaggtgttagtatgacatttgaagagaagcttagcaaaatatacaatgaaattgcgaatgagattagcagtatgataccggtagagtgggaaaaagtatatacaatggcttatatagatgatggaggaggtgaagtattctttaattatactaaaccaggtagcgatgaattgaattattacacgaatatatctaaagattataatgtttcagaggaaatatttgatgatttatggatgaatctgtattacttgtttaagaatttaaggaatttatttaaagaagaaggtcttgagccatggacatcatgtgaatttgattttacaagagagggtaaattgaaagtatcatttgattatatagattggataaatacagagtttgatcaattgggccgtgaaaattattatatgtacaaaaaatttggggttataccagaaatggaatatgaaatggaggaggttaaacaaatcgagcaatatattaaagagcaagaagaatagacaatcttcatgagagactaaacaataaagctttgtttagtctttttagcgtttaagtaaaaagcaatagataccgtaaagttgatgctcatcaaataataatataaagataattttaggtttttaaacttttaatcgaaaagaatctaagtttatagctttaaatacgtaatatgctatttaaaaaataatgtataggagatagatatgactactaaggaaaatatagacattcttcgaaagccaggtgcacaagccttaagtttaatatcattgtttttgatacttttttcatgtctaactttcttttttggtttagattatgaaaggtttccaaactatttaaagataacgacaattatagaattaataattattgtaattagtttacttcaatggattaggtttatagatttcgaaaaagaaagtgcacagaaatataaaaaaatatatgctcgatttttagttattataaatgtgttaactacgatcactgtagtatttgcactgtgtaacctttattattttgcagctgtacaaaaccattatgatttattcaattattggttaatgggtacgatttcaatcataattagctatttattattagtaattggcggaatgtttacgttgttaaaattacctaaagtaacaaaacgctggggtggtaaaactaaaacacatttcggtttattattaactgcgttgagctcatttatatatattgaaaaaattatcgaatatatattgattcctaatgtcgtagaatccaagtttataattattgtgagcatgttggttatcgctggagcacaatttgtggcatttcaatttattatgcaatacagtagattctatatttttgaattaaatacagaagatgatgactaaatgattttgtaaattctgtgaagtatacttatataagaaaatcaacttcaacgtatatcaccatattattttatactcaatgatgtgaatggatttaagtggattgatattaaagtaaaagttatggaatattgaggtgcgaatatggagttcttattattaattgtcgtagccggactgtattatattatatatttaactgctgtgatgtattctgaaaaaatagtagtattgcctataatcatctatgccattgtgtttgtaataattggtatcacttatatctttataggcgacagctatgatcaattaacaaatttcaatgtgattttgtatatggggagtttgttttatgcatggatggcttttagaaatctttggaacagaccattattattaaaatataagaatattacagatagttcaagtggaatagttaataaatctgaatacaattcagttgaaagcttacgtataaatattgaaatagctaagtataaagggattatttctttgatagtagctatagtactaacggtattaatgacattaaagtcaacacctcaaattactgcggaaacacgtgacttaagtatctcatttttcatactcagcttatttatcattgttatatttgctgtttgggatttaattattagagttagaaaaggagcgtttgcttttgttgtaataaggccaatattattcagttgttggttatttattctgaatatgattttatcgagattattataatgatattacatataggtatgcgtgaattttatttatgaaatggtaaaaaagtatatactattaatatcttttttactataattataaatagttaaataaattgaaagacaaaataatgagtaggagttaatgagatggaaaaccaaaatcaaggcaatggcttaaaaattgcaacatgggtatttattgtattaacaatagttacaccgttatttggtattggaagtattgtttgtagtattaattacaaaaaatacgatgctgaaaaaggttcgaagttattgcaaattgcaattatcgtaacaataattgcttttgttttaaatttattagcatatttaggtttaagataagtaaaacgaatttgaagaagcattaagcgacatttgggtgttgtttaatgctttttatttaacggtaatgaaaatataggggagataacatgactttcgaagaaaaactaagtcaaaagtacaacgagattgcgaatgagatcaatggaatgataccggtagagtgggaaaaggtatatgtaattgcatatgtggacgatggaggtgggcaagttatattttattataccaagcccggaaatgatgagctgtattattattcgagtatcgttgaagattataatgttttagaagaagtctttgatgatttatggatggaactttatagatcatttaaaaaattaagaaatatatttaaagaagaaagtcttgaaccatggacatcatgtgaatttgactttacaagcgacggtaaattaaacgtatcttttgattatatagattggatgaattcagaatttggacaaatagcaaaagaaaattattatatgtacaaaaaatttggaattgtacctgaaacggaatatgaaattaataaagttaaagaaatcgaacaatatattatagagcaagaagaagctgaacaataggggagataacatgactttcgaagaaaaattaagtggaatgtatagcgagattgcgaataagattagtagcatgataccggtagagtgggaaaaagtatatgcaatggcatatatcgatgaagaatgtggagaagtgttttacaattatactgaaccaagaagtgatgaattattttactatacaagtgtgataaagaagtataatttattgaaatcaagctttatggattcagtatatgagttgcatgatcaatttgaggaactaagagaagtatttatagaagaaggtcttgaaccatggacatcatgtgaatttgattttacgagcgaaggtaaattaaaagtttcatttgattatattgattggataaatacagagtttgatcaattaggccgtgaaaattattatatgtacaaaaaatttggtgttttaccagaaacggaatatgaaatggaggaggttaaacaaatcgagcaatatgttaaagaacaggaagaataaactatcttaatgtaagactaaacaataaagctttgtttagtcttttttagcggttaagtaaaaagcaatagagaccgtaaagttgatgctcatcaaataataatataaagataattttaggttttcatacttttaatcgaaaagaatctaagtttatagctttaaatacttaatatgctattacaaaatcaatgtataggagataggtaaatatgactactaaggaaaatatagacattcttcgaaagccaggtggacaagccttaagtttagcatcattatttatgatacttttttcatgtctaactttcttttttggtttagattatgaaaggtttccaaattatttaaagataacgacaattatagaattaataattattgtaattagtttacttcaatggattagatttatagatttcgaaaaggaaagcgcacagaaatataaaaaaatatatgcccgatttttagttgttataaatgtgctaactactatcaccgcagtatttgcaacatgtaatctttactattttgttgctgtgcaaaatcattatgatttatttaattattggttaatgggtactatttcaatcataattagctatttgttattagtaattggcggaatgttcacgttattaaaattacctaaagtaacaaaacgttggggtggtaaaactaaaacacatttcggtttattattaaccgcgttgagcgcatttatatatattgaaagaattatcgaatatatattggttcccaatgtcgtagaatccaagtttgtcataatggtaagtatcattattattgcttgtacacaatttgtagcctttcaatttattatgcaatacagtagattctatatttttgaattaaacactgaagatgatgactaaataattttataaattactgttggagtatacttatataaaaaatcaacttcaacacattattttttactcaatgatgtgaaagaatttgagtggattgatattaatgggatttgattattagaattagaaaaggaacgtttgcttttgttgtaataaatctaatgtttttcagttgttggttatttattctgaatatgattttatcaagattattataattgtattacatataggtgttggtaaatttttatttacgaaatggtaaaaaagtatatactattaatatcttttttactataattataaatagttaaataaattgaaagacaaaataatgagcaggagttttatggttattatttacaaataatataatactaaaaaagactcgaaattatttggaattccagttatcgtaacaatagttgcagttattttagttccattagtgaatttaggtatgaaatgagtaatattaatttgaagaagcattaagcgacgtagaggtgttgtttagtgctttttatttaacggaaatgaaactaatatctattttgaaaatataggggcgataacatgactttcgaagaaaaactaaatgaaatgtacaacgagattgcgaataagatcagtgggatgataccagtagaatgggagcaagtatatacgatagcctatgtaaatgatagaggtggagaggtcatttttaattatactaaaccaggtagcgatgaattgaattattacacggatatatctagagattataatgtttcggaagaaatatttgatgatttatggatgaatctgtattacttgtttaagaatttaaggaatttatttaaaacagaaggacatgaaccatggacatcatgcgaatttgactttacaagagatggtaaattaaacgtatcttttgattatattgattggatgaattcagaatttggaccaatgggaagagaagattattacatgtataaaaagtttggaatttggcctgaaaaagaatatgcaataaatagggttaaaaaaatagaagattatgttaaagagcaagaagaagctgaactataggggagataacatgactttcgaagaaaaactaagtgaaatatacaacaagattgcgaatgagattagtgggatgataccagtagagtgggaaaaagtatatacaattgcttatgtagatgatgaaggtggagaggtcgtttttaattatactaaaccaggtagcgaggacttgaattattacacatatatccctagagagtataatgtctctgaaaaagtattttatgatttgtggacggatttatatagattgtttaagaagttaagaaacgcatttaaagaagaagatttagaaccatggacatcatgtgaatttgactttacaagagagggaaatttgaaagtatcatttgattatatagattggattaaattaggttttggcccatctggaaaggaaaactactatatgtataaaaagtttggtgttttaccagaaatggaatatgaaatggaagaaattcgagaagtagagaagtatgttaaagaccaagagtagcatatatgttatagaaggctgtgcaaaaccaacctcgttatacatttgactcaaagaagaaggtaaaaaataagattatttgtaacttaaaaagtctattagcttctcggtatccatacatcatatgtatagatgagtttaactaattaataaatcacgatataaatttaaaattgccattaattgaaaaggttattgtagtgtattttataaagttgatgcacatcgacttattttttaaagcttatatcaaaaaaatatgagaaaagtatatactattaaaatgttttttactataattataaatagttaaatatttggagattaaataaatatataggaggcaatttttagagatacatagcaatgtaaaggtatcaaatagttattgcataatttattatgatgacataattttcagtagatagttgtaaattaacactgaaatagatgtttatattaagaagactttaatatcataattaatcaaaatcttgcgtcaaacatttaaacgaattttaagtttataacaattggttaaacattgttcaaacgttacaatgataaagtatattatcagtattgtagtgtgtggaaaatgacagccatctgaggagaaaaatgatgaaaagaatattggtagtatttttaatgttagcaattgtattagcaggttgttctaataaaggtgaaaagtatcaaaaagatattgataaagtgtacaaagaacagaatcaaatgaataaaattgcctcgaaagtacaaaacactattaaaacagacattaaacaagaagacagtaatacacatgtttataaagatggtaaagtcattattattggtattcaattgtataaagatcgtgaaaaaatgtattatttcgcatatgaaataaaagatggtaaggcagagatcaatagagaaatagacccaattaagtatatgaaagaccataaagcagattatgaagatgaaaatgtagaagtggaaaaagattaacgtaggctttctttaaaacttttaaccagtttcaaaaagtaaatgagctttagcgacaataatttttaaaataaacacgatataaatttaaacatttatatataagaacacaaacgcaagtttgtaaataataataataataaaggagtaagacaatggaaaaatcgatcaaaataatgacagtaataggaattgttgttcagggtttagcaacggtatttagtttactattgatggttttagcagcatcaggtgtaatgactacagatgtgtcaacaacagttaatggtgaggttgacccagttgatgcagaaacagcagcagcaattttcactgtattattcttatccctattcatatttggaatcatttcaattattttaggtgcaatcggtatgtttaaagcatctaaaaacaaaaaaatgagtggtatattgttgattattggagctgtaataagtggtaacataattacatttgctttatggttaatcagtggtattaaactacttactaataacaagcctaaagatgaaataagcgacttatcataaacatcgtatattgaaatttcaagatttcttaagtaattaaataaagtgctctcttagaagtagattttcagtcaataactgcttttaagagagcattttgtatttgataatgctcatagcatcggataaaaatcattgacgaactttaaaaaaatacgttagacaatgcacttctaaatattaaaggcatcgactaacgcattgttcaaatagagttaattatttttataaaattgatgatgatcattcaagtaagcatagaataaacctataatgagtccgcctccaatatagttaccgataaaagccgcagcgatattcgaaatagctggtatgaagtgcaatgtatcaacttgataaattaaaccacccataaataagcaactgttgtaaacgacatgttcataacccataaaggcaaatatggtaacaccgaacatcatgacaaacatttttgcgagtacatcgtcaatttgcatggcaataactaatgaaatattgataaagaaattggcgaatatcgctttcattaatatacttacaaaaccagtagacaacgttttgtgctcaataactgctgataactgatttaacatatctggcgtcattacatttgaaaaacgcatgaaactaaataaaatagcagcacctaaaatatttcctgcaaagcataataaaaatattttcaatactctagttggtttaattactttataatacaggcctacagtaaagtacatgaagttactggttagtagttcggagtttgtaaataaaatgagtactaacgcaaagctgaatgtaatggcactggccatattcacaatgcctggcggtaaatctggttcgtgtgttgctttaactgataatacgaagaccgtaataatcccgataataaatcctgccatcatcgcgcgtaataaataacgttttaaataaacgctttgtaatatatctttcgttcttatcgtttcgactacgttatttacccagtcgtccccataaaatattttatcccatttaatatgtttctccttcacaatgacatcctcacttttcatttgttaatcagagtatactatgaattgccttatttgtgaataatttcacaaaattaattttaaaaactaatatttttgaataacagctaggattttttaacaaatcatttattttaaaataattaatagacagacggtatcactgaaaagtcatgaatttcatataaaaaagcctagtaacgatgggtcaatcattactaggcagtgagcatttattaagttgtcgcttgtttcggacgacgtataactacatcgatgatgaaaccgataatagcaaagagcatgaatggtacaagccaagctaaatcgatatctgctaaaggtaacatcataaaccatttcaaaataacaccgtgtaataagttgaaactatttagtatttgtaaaattgaaataatcaatgtaataacagttgcgagtcgataggcccaactgaatctgaatttgctaaacatgttagcaaatgatatgagtacaagtgcaatcgacacgggatatattaaagtcaataatgggacagcaatttttaaaatcatttctaaaccaagtgttgtaaataagaaccctatgatagagaaaataagtgcgaatattttataagaaaacttaggtacgtgtttcttagtaaatgtggcgcaagcattgacgagtcctatacatgttgttaaacatgcaagtatcactgtcataccaaatactatgttgccaaatgaaccaaatactcgtaatgagttatacgtcaatatatctgtaccatctttaaagtttcctggagccgttgatgccccaacgtatgcaagtgcaaagtaaatcattccaagtaatatggctgcaataagacctgaaaagcagacatattttaaaattttcatgcgatctgtgaggcctttaaacttatagccattgacaatgactacggaaaaagctaacgcagcaacaagatccattgtaaaatagccttccaaacttcctgaaatgaaaggatgtgttatatatttatccttaggtgcacttagtgcagattcagggttgaaaatgacagcaatacttaatagagcgaccattaatagtaataatggtgttaataatttacctaaattatcaacgattttcgatggatttaaactaatccagtaaacgatggcaaaaaagactgctgcgaatataattaaagtccattggttgtgcacaggtaaaatgtgtcttgtaccaatttcgtacgcgacatttgcagcacgtggaataccgtaaaatgctccgatagacatgtaaatcacgacagcaaaaataaacccgaaccatggatgtatacgattgcctacactttcaacaccttcatcataaaatgcaacaacaataacagtaataaaggggagtaatatgcctgtaagggcaaagcctaacataccaatccacatattttgacctgctgtatggccaagcatgggcgggaatattaaatttccggctccaaaaaatagtgaaaataacatgaggcccgaaataataacttgtcttttcaatgtaatttccttcctaaaactagatattcataataatttaaaaaatctgaaaaataaaaacgttcttactttatctttaaatgacaatactatgattctattattttataaaaaagattgcaataataacgtcttgctattattggataatgacaattaaagtgtcgtttttatgaattaaaataggtgaaagtaagttggaaatacgttggagcgttgtgatttttatgagaaattgtatgagtgaggactgctatttataaaaggtaaactatggatgagtttatggttgttccaataggtaaataagagatagcacactgtacacataatgatacgtggatgagtgaatatgtctgataggaaggcctagtcactcaaatgaatttaagtttattacgtgataaatcacaaatctctctcatgtgataggtctcccattaaatcatgcttatatgaaatgttcacatatttgttagcttttcaagaaataatattaaatatcttttcatagtatagcaatattaaataaatgcatttataattttaactgtattttaaatattaatcatgaggtgataagatgaataaaatttcaaagtatattgcaatagcatcattatcggtagcggttacagtttcggcaccacaaacgacaaattctacagcgtttgccaaaagttctgctgaagttcaacaaacacaacaagcttctataccagcatcacaaaaggcgaatcttggtaatcaaaatattatggcagtggcttggtatcaaaattcagctgaagcaaaagcattatatttacaaggttataacagtgcaaagacacagttagataaagagattaaaaagaataaaggtaaacataagttagctattgctttggatttagatgaaacagttttagataattctccatatcaaggctatgcatcaatacataataaacctttcccagaaggttggcatgaatgggtacaagctgctaaagctaaacctgtctatggcgcaaaagaattcttgaaatatgctgacaaaaaaggtgtcgatatctactatatttctgatagagataaagaaaaagatttaaaggcaacacaaaagaacttaaaacaacaaggtatccctcaagctaagaagagtcatattttactaaaaggtaaagatgataagagtaaagaatcacgcagacaaatggttcaaaaggatcataaacttgtcatgctatttggagataatttattagactttacagatccaaaagaagctacagctgaatctcgtgaagcattaattgaaaaacataaagacgatttcggtaagaaatatatcattttccctaacccaatgtatggtagttgggaagctacgatttacaacaataactataaagcaagtgacaaagcaaaagataaattacgtaaaaatgctattaagcaattcgatcctaaaacaggcgaagttaaataatatatgaattggacgtctacatgtacttaaaggtatatgtagacgtttttaaattgatccttaattttaaatgtaccgtacaaaaataatagacaattaattgcattttccataaatttgcttttaatataaaaagttcgggtataatgaaggataagtgtatgtataacattacagagcgcaacacgacgtacgtgcatctaagaatataaacaatgtttaaattatagtagtagggagagaaatgcatgtttttagcttggaatgaaatacggcgcaacaaattgaagtttggactaattattggtgtgttaacgatgattagttacttgctatttttattatctggattggcgaatggtcttatcaatatgaataaagaaggcattgataagtggcaagcagatgccattgttctaaataaagatgccaatcaaactgtgcaacaatctgtttttaacaagaaagatattgaaaataaatacaagaagcaagctactttgaagcaaacaggggaaattgtgtctaatggccatcaaaaagacaatgttttagtgttcggtgttgaaaagtcatcatttttagttccgagtttaatagaagggcataaagcgactaaagataatgaagtgttagctgatgaaacacttaaaaataaaggatttaaaattggcgacacattatcactatctcaatcagatgaaaaattgcatatcgtaggttttacagaaagtgcaaaatataatgcgtcaccagtcattttcacgaatgacgctaccattgccaaaatcaatcctagattgactggagataaaattaatgcagttgttgtacgtgatacaaattggaaagacaaaaaattaaaccaagagcttgaagcggtaagtattaatgactttattgaaaatttaccaggttataaaccacagaacttaacattaaactttatgatttcattcttatttgtcatttcagctacagttataggcattttcttatatgtcatgacattacaaaaaacaagtttatttggcatattaaaggctcaaggatttacgaatggctatttagcgaacgtagttatttcgcagacgctcatattagcattatttggtacggcatttggcttactgttaacaggcgttacaggtgcatttttacctgatgcagtacctgtcaaattcgatgtactaacattgctcgtatttgcaattgtgttaatgattgtctctgtattaggaagtttattctccattttaacaattagaaaaatagatccgttaaaggcgatcgggtaggaggtgtagcaaatgttgaaatttgaaaatgtaacaaagtcatttaaagatgggaatcgtaacattgaagcggttaaagatacaaattttgagataaataaaggtgatattatagcattggttggaccttctggctctggtaaaagtacatttctaactatggcaggtgctttacaaacaccgacatctgggcacattttaatcaataaccaagatattacgacaatgaagcaaaaagcattggcaaaagttagaatgtctgaaataggttttattttacaagctacaaaccttgtaccatttttaacggtaaagcaacaatttacattattgaaaaagaaaaataagaatgttatgtctaatgaagactatcagcaacttatgtcacaattaggtctaacttcattgcttaataagttaccttcagaaatttcaggtggtcagaaacaacgtgtggcgatagccaaagcgttatatacgaatccgtcgattattttagcggatgaacctaccgcggcgttagatactgaaaatgcgattgaagtcattaaaattctacgtgatcaagccaaacaaagaaagaaagcatgtattattgttacacatgatgaacgacttaaagcatattgtgatcgttcatatcatatgaaagatggcgtccttaatcttgaaaatgaaacagtagaatagttttattaagccggtacatcatgtgccggtatttttatgtttatgtattatttgaataaactttcacattcaattaataataattattatcgaaaatcagaaatattccgtgaaatataatattttttgtagtaaaatggcctctaagtattcaatatttaaatatggggattgaatataaaattatcgtaatgggggtcaatggttatggatttattgataggtactttatttttatttttggtcttagtgatttttacattatttacatataaagcacctaatggtatgcgtgccatgggagcattagctaatgcagcaatcgcaacatttttagtggaagcatttaataaatatgttggtggcgaagtattcggtattaaatttttagaagagctaggagacgctgcgggaggtctaggtggtgtcgctgccgctggattaacagcattagctatcggtgtgtcaccagtatatgcattagttatagcagccgcgtgcggtggtatggatttattaccaggtttctttgcgggttatatgattggatatgtgatgaaatatacagagaaatatgtgccggatggtgtcgacttaattggatcgattgtcatcttagcgccattagctcgtcttattgcagtattattaacgccagtagtgaatagtacattgattcgaattggtgatattatccaaagtagtacgaatacgaatccaattatcatgggtatcattttaggtggtattattacggttgtcggcacagcgccattgagttcaatggcattgacagcattattaggtttaacgggtgtacctatggctattggtgccatggcagcatttagttcggcatttatgaatgggacgctattccatcgcttaaaattaggtgatcgtaagtctacgattgcagtaagtattgaacctttatcacaagcagatattgtatcagccaatccaattccaatctatattacaaatttctttggtggtgcgattgctggtttaattattgctatgtcaggtttaattaacgatgcgacaggtacagctacaccgattgcaggatttttagtaatgtttggatttaatcatccaatgactattgtaatttatggtgtagtaatggcgattgtaggtgcgcttgcaggttatcttggttcaatcgtatttaaaaaatatccaattgttactaagcaagacatgattaatcgaggtgcagttgacgcatagcatcatcatattgaatagtaaaaacaaataaaacatagtaacgtgattcagtcgatgaaaaaatcgataatgagtcacgtttttttatagaaaaatataagacataaaaatgtcataatttattgtcgacaaatatcatactgtataaacatttatcattttctcaagtaccttttacacgatggaatgaacttactttttacgaaattatgcgtattttataaacatatatcattgatataacggtaaatgtaagcgtttacaacagaaataacagcatgctacgatatttttgtaaattcactgattcaagtattttaagtcaatatgaggagggatgttatgagcgattctgagaaagaaattttaaaaagaattaaagataatccgtttatttcacaacgtgaacttgctgaggcaattggattatctagacccagcgtagcaaacattatttcaggattaatacaaaaggaatatgttatgggaaaggcatatgttttaaatgaagattatcctattgtttgtattggcgcagcgaatgtagattgtaagttttatgtgcataaagatttagttgcagaaacatcaaatcctgtaacgtcaacacgctctattggtggcgtagcaagaaatattgctgagaacttaggtaggcttggcgaaacggtcgcttttttatctgctagtggacaagatagtgaatgggaaatgattaaacgattgtccacaccatttatgaatttggatcatgttcaacaatttgaaaatgcgagtacaggttcatatacagctttaattagtaaagaaggcgacatgacatatggcttagcagatatggaagtgtttgactacattacgcctgaatttttaattaagcgttcacacttattgaaaaaggctaagtgcattattgtcgatttgaatttaggcaaagaggcattaaacttcttatgtgcctataccacgaaacatcaaatcaaattagttatcaccacggtttcttccccaaaaatgaaaaatatgcctgattcattacatgctattgattggattatcacgaataaagatgaaacagaaacatacttaaatttaaaaatagaatctactgatgatttaaaaatagctgctaaacgctggaatgatttaggtgttaaaaatgttattgtgacaaatggcgtgaaagaactcatttatcgaagtggtgaggaagaaatcatcaagtcagttatgccatcaaatagtgtgaaagatgttacaggtgcaggcgattcattctgtgctgcagtagtatatagctggttaaatgggatgtctactgaagatatattaattgctggtatggttaacgcaaagaaaacgatagaaacgaaatatacagttaggcaaaacctagatcaacagcaactttatcacgatatggaggattataaaaatggcaaatttacaaaagtatattgagtattctcgagaagttcagcaagcacgggagaacaatcaaccgattgtagcattagaatcaacaattatttcgcatggtatgccgtacccacaaaatgttgaaatggcaacaacagtagagcaaattatcaggaataatggtgccattccagcaaccatagccattatagatggcaaaattaaaattggtttagaaagcgaagatttagaaatactggcaactagtaaagacgttgctaaagtatctagaagggatttagcagaagttgttgcgatgaagtgtgttggtgctactactgtagcgacgacgatgatatgtgctgcaatggctggtattcaattttttgttacaggaggtattgggggcgtccataaaggtgcagaacatacgatggacatttcagcagacttagaagaactgtctaaaacaaatgtcactgttatctgtgcaggtgccaaatcaattttagacttacctaagacgatggagtatttagaaacaaaaggcgttccagttattggatatcaaacgaatgaattgccagcattcttcactcgcgaaagcggtgttaagttaacaagttcggttgaaacgccagaacgacttgctgacattcatttaacaaaacagcagttaaatcttgaaggtggcattgttgttgctaatccaattccatatgagcatgccttatcaaaagcatatattgaggcaatcataaatgaagctgttgttgaagcggaaaatcaaggtattaaaggtaaggacgccacaccgttcttgttagggaaaattgtagaaaaaacgaatggtaaaagtttagcagcaaatataaaacttgttgaaaacaatgcggcgttgggtgctaaaattgctgtcgctgttaataaattattgtaggtgatgatacatgaatattttattcgctatcacagggatagcatttgcactatttgttgcgtttttattcagttttgatcgtaaaaacatagacttcaaaaagacgttaataatgatatttattcaagtgttgattgtgttatttatgatgaacacaacgattggtttaacaatcttaactgcattaggctcattttttgaagggttaataaatgttagtaaagcaggtataaactttgtttttggagatatacaaaataaaaatggctttacgttctttttaaatgtgttactgccattagtgttcatttctgtattaataggcatttttaattatattaaggtattaccatttattatcaaatatgtaggtatcgctattaataaaataacgagaatggggcgcttagaaagttactttgctatttcaacagcaatgtttggacaaccagaagtatatttaacaataaaagatattattccaagattatctagagcgaaattatatacaattgcgacgtctggtatgagtgctgttagtatggcaatgttgggttcatatatgcagatgattgagcccaagttcgtagttacagctgtaatgttaaatatttttagtgcgcttatcatcgccagtgtaatcaatccctataaatctgatgatagtgatgttgaaattgataacttaactaaatcaacggaaacgaaatcagtgaatggaaaaacaggaaaacctaagaaagttgcctttttccaaatgattggtgatagtgcgatggatgggtttaaaatcgctgttgtagtagccgtgatgttgttagcgtttatttcattaatggaagcaatcaatatcatttttggtagtgttggtttgaattttaaacagttaattggttatttgtttgcacctatcgcattcttaatggggattccttggagtgaagctgttccagctggctctttaatggctacaaaattaattacaaatgagtttgtagcaatgctagattttaaaaatgttttgggtgacgtatcagctagaacacaaggtattatctcagtttacttagtgagttttgctaatttcggtactgttggtatcatcgttggttcaattaaaggaattagtgataagcaaggagaaaaagttgcatcctttgcaatgaggttgctacttggttcaactctagcttcaatcatttcaggatcaattattggcttagtattgtaaattaatcgaagtatctaaattaaattcatggcaaagctaaaccccgtcaccaagttggcgcaacagcgcatcataacttagtgacggggttttatcataacaatctactttttcgtagccgtttttgaaatgtatgttgatggtttatctttttcaaaaattgttaatcccgttatatcttttttatgttttgaagggacaatgaagctaagtatataagcaaagacaaaagcaactgtaaatgaaatggtagatacatagaaaggtgagttacctttgccaacatcattatagacgtaagcaaagatgatacccaatattaatccacaaataacaccgaatgtattcgtacgtttagtgaaaataccaactgcaaatacaccagccaatggaacgccgaataatccagtcacaaacaagaataaatcccataagtcatttgaattagaagcaattaagtatagtgacattccaaaaccgaaaatacctgcaatgatgatgaccaaacgagcaaagttaacttcgtgtcgctcgctaccttttccgaagaagcgttgcttaatgtcgattgaaatacaagcagatatagaatttaaactagatgaaatggtagactgtgcagcggcgaaaatggctgcaataagtaatcctgctacaaatggtggcatctcagtcaaaatgaaatatggcactacagatgatgtattgaagccttttggtaaaacagcttcatgtgtataaaatgaatacagcattgtacccataccataaaataagggtgctgaaattaaagctaggataccatttgtccataacgatttatttgtttcttttaaactatcagaagcttgataacgctgcacgacgtcttgactcgctgtgtattgatacaagttgttgaaaatatttcctaggaaaataattggaatggcagctgccgcagtgtttagcttccaattatctgcactaattaattttttgtgctcaatcgcatctgcaaagacagtgccaaaaccgcctttaatgttcataacacctagaataataataactaaagcgccgcctaataaaatgacgccttgaatgaaatcactccaaaccacaccttcgaatccacctaaaaatgtatataaaatacatagtaaaccaacgagtgatgcaacgatataagggttcatgtctgatacagatgtgattgctaatgttggtaagtagataacgattgcaacacgccctaaatggtaaacgacaaataataatgagccaatgacacgtatgctagggccaaatctagcttctaaatattcatatgcagatgttacctttaactttttaaagaaagggacatagaaataaataagtaatggaataattgctacgatagcgatgttacctgcaatatatgaccaatctgttaaaaatgctttctctggtgtcgacataaacgtaattgcacttaatgtagtagcataaattgaaaagccaactacccaagatggcaagcgaccacttgcagtaaagaaactattcgtactttgactcgcgcgcttggtaaaataaacgccaatgagtaacatagctagtagataaatgataacggcaacccagtttagtgtgccaaatccaacttctttcatgggaaacatcccctttacaatgtattgattctttgatgtctataaatcgtattttgcaatgagttgatctaatgtttgtcgatgtgcttcgttaaaaggtttgaaaggtcttttcggtaatcctgcatcaatgccacggtgacgtagtatttctttcaatgttggataaatccccgttgataacactgtttcgatgatgtcgttcgaatcatgttgtagttggtaagcttcttgaatttgaccttgtcgtgctaagtcgaagatttttctagcacggcgaccattaacgttatatgtagaaccaattgcaccatctacgccagaaatcgtagcttgaactaacatttcatcaaagccagataagattaatttatctgggaatgcttttctaatacgttctagtaagaagaagttcggtgctgtatatttaacaccaacaattttttcgtgattaaatagctcgctgaattgttcaatagaaatattcacacctgttaaatctggtattgcataaataatcatattgttctgtgttgcttcgataatatcgaaatagtaatctctaatttcttcaaaagtaaatggatagtagaatggtgttacggcagaaagtgcatcataaccgagttctgtggcatattttccgagttcaatggcttcatttaaatctaacgaacctacttgagcaatcaatttcactttatccccaactgcctctttggcaactttgaaaacttgcttcttctgctctgtatttaataaaaagttttcgcctgagctaccatttacataaagaccgtctaattcttcagtttcaatggcattttgagcaatttgtttgagtccttgttcatttacttgaccattttcatcaaaaggaacgagtaacgctgcatataaaccttttaaatctttgttcattatgaagtccctccaaaaatcatttgataatatagtttacagctataattgtaaacgctatcataaaatgtaacaatatctttttgaaaattgtagtcatatttatgtataattaatgaaaatgtttttcaaaatcaatagaaatggagtgagtaaggtgtattacatcgcaatcgatattggaggcactcaaattaaatcggcagttattgataagcaattgaatatgtttgactatcaacaaataccaacgccggacaacaaaagtgagcttattactgacaaagtatatgagattgtaacaggatatatgaagcaatatcagttgatccaacctgtcataggtatttcatcagcaggcgttgttgatgaacaaaaaggcgaaattgtatacgcagggccaaccattccgaattataaaggtactaattttaagcgattattaaaatcattgtctccttatgtcaaagtaaaaaatgatgtaaacgctgcattactaggcgaattgaaattacatcaatatcaagcagaacggatcttttgtatgacgcttggtacaggcattgggggtgcgtacaagaataatcaaggtcatattgataatggtgagcttcataaggcaaatgaagttgggtatttattgtatcgtccaactgaaaatacaacgtttgagcaacgtgctgcaacgagtgcattgaaaaagcgcatgattgacggaggatttacgagaagcacacatgtgccagtattgtttgaagcagctgaagaaggtgatgatattgcaaaacaaatattgaatgagtgggcagaagatgtagcagaagggattgcccaaatacaagtcatgtatgatccagggcttatattaattggtggcggtatatctgaacaaggagacaatctcattaaatatatcgagccgaaagttgcacactatttaccaaaagactatgtttatgcaccgatacaaacgactaagagtaaaaatgatgcagcattatatggctgtttgcaatgatagttgaaagaaggagtcattctaaaatagaatttgaaaccgttacgagagatgagagctgttgttagttccacacatcacactctatctaggaccaatctaaactatatcaaccaacagtgtgccacgggcatattaaattgaagaagctgagatattaaaattttagaaaatgtaaaaaaatatttggtattgaaattaaaaaagcacctagcaactcgttggggcaatcacgatgattgtctacagttgcaggtggatttgaatatactactagttatttgttgtctaggataatagatttagtatgttgataagtttgactcagattcgtattttctaataaatgataactcacgatatcgattaaaaagagtgtcgcaatttgtgtgttgataaattgatggtcggtattacgcgattgatccgttgttaaaagtactaaatctgcacaatctgtaagtttactaccttcaaaatttgtgatggcaacgacatatgcaccatgagatttggcgacttccgctgcagaaattaattccgaagtattaccactatttgacatagcaataaacatatctgaatgagatagtagggatgccgatattttcattaaatgtgaatcggtagtaacattaccttttagccccatacgaatcatacgataataaaattcagtcgctgataaaccagagctacctagtccagcaaagagtatatgtcgacttgattgaagtttgtcgataaaggtttggataatgtcgttatcaataaattcaccagtttgttgaatgatttgttgatgatatttatgaattctttgaatgattgggctattttcaataactgtctctgtcatttcttgttgaatattaaattttaaatcttggaaattctcataatccagcttatgactaaagcgtgtcattgttgctggtgatgtaccaatcgcatgggctaaggagttaatcgttgaaaaggcatcgctataaccattttgtcttatataattgacgatgcgtttatcagtttttgtaaataaatgttgataacgttgaacacgattctcaaatttcattgtgtcaccccttcatcttaatgattactattatatatgaaaaatattttcaagatagtaaaaagcattgataaaaattatcttaatgatatattgtaaatgactttacgtgaaaaaatgacttatggagtgaggaataatgttaccacatggattaatagtatcttgtcaggcactaccagatgaaccattgcattcatcttttattatgtcgaaaatggcattagctgcgtatgaaggtggtgctgttggtattcgcgcaaatactaaggaagacattttagcaattaaagaaacggtagatttaccagttattggcattgtgaaacgtgactatgatcactcagatgtttttattactgcaacgtcaaaagaagttgatgaactgatagaaagccaatgtgaagtcattgcattggatgcaacgttacagcaacgtccaaaagaaacgttagacgaattagtatcatatattagaacacatgcaccgaacgttgaaattatggctgatatcgcgaccgttgaagaagctaaaaatgccgcacgacttggctttgattatattggcacgacgttacatggctatactagttatacgcaaggacaattactttatcagaatgacttccaatttctaaaagatgtactacaaagtgttgatgcaaaagttattgcggaaggtaatgtcattacaccggatatgtataaacgcgtgatggacttaggcgttcattgttcagtcgttggtggtgcgataacacgaccaaaagaaattacgaaacgttttgttcaagttatggaagattaaatgataacgataaaaaaacgagatgaccatcattaattaaaggtacctaattatcttaggtggctgaatgaatgtaatgggttcatctcgttttgtttgtttacgatagtgattttattttcaatttgaattatccaaaaataagtaaagcgacggggatggtgattaatagcgagaatgccacgcgtaaaaaccaaatgatgatgagtttccagacaggtattttaatttcagttgctagtatacatggcactaatgctgagaaaaagataatggctgatacgcttactacaccgacgacaaatttagtactcattgcagctttagttactaacaaagatggtagaaacatctctacaatagaaatcgctgacgcttttgcaagtaaagcctgatcagcaattgggaaaatataaataaatggatagaatatatagccaagccaatcaatgaatggtgtatagttcgctacaatcagtcctaaaaaaccaatcgataatatagaaggtaaaataccaacagtcatttctaaaccgtctttcaaattgtcccaaacgttcttcacgagggatggtgttaatgcattttgtttcatcgcctctgcatatgcagttttcagtctgcttccttcaatagcaacttcttgttctccttcttgtccgttataatattctgttgattcattggtgattggcggtagccatgcagtaattgcagtcacgacaaatgtgatgactaaagttatccaaaagtataaattccaatgcggcattaatcctaaagttttagcaacgataatcataaaagttgctgaaactgttgaaaagccagtcgcaataatcgtggcttctcgtttgttgtacatcccttgcttatagacacgattagtaatcaataatcctaaggaataactgccgacaaacgaagctactgcatcgacagcggattttcctggtgttttaaaaataggtctcataataggctccatataaacaccgacaaattctaataagccatagcctactaataaagaaagcgcaattgcacctactggaattaagatacttaatggcatcattaatttttcaaacaagaacggaccatagttagctttaaatagtattgatggaccgattttaaatacatacattataccaatcattgcacctgcaactttaaataatgtaatgaccaagtttgtgattgaagtcataaaagtacgtctcactattggtaacgctgtaccaattaaaatcataatcagtgcaacatagggcataagtggacctatgattgagcgaatggctagatgaacatgatcgacgaaaatagtgttgttaccattaatcgtaaaaggaataaagaaacatagtatgcccactaaactatagacaaaaaaacgccatgcacttggttgttgtgcattagaatgatattgattcattaaagcaacccctttgtttaaatgaatacacaaaactgtatgatgcatcttccccttaatgagatgaatcattattttaatttagaaaaatctgaaaacttactataattgtatagtttgaattattttcataccaatacaaattaactaattatatatagattgaaactatattgcttaataaaatatttatcttaaatgttgttgtgttgattcaacgccacaactaaaagtgtttataaattatttggaaatgcacatatttgtaaatgattagtatcgatttaatatcgtattattaaatttttattaattttgtagtcttaatcaaaaaataatatatgtcatgttatattgaaggtgcagttgtttttcattctcaagagggggtcaaaaaaatacttttgaggtgattatatgttaagaggacaagaagaaagaaagtatagtattagaaagtattcaataggcgtggtgtcagtgttagcggctacaatgtttgttgtgtcatcacatgaagcacaagcctcggaaaaaacaccaacgtccaatgcagcggcacaaaaagaaacactaaatcaaccgggagaacaagggaatgcgataacgtcacatcaaatgcagtcaggaaagcaattagacgatatgcataaagagaatggtaaaagtggaacagtgacagaaggtaaagacacgcttcaatcatcgaagcatcaatcaacacaaaatagtaaaacaatcagaacgcaaaatgataatcaagtaaagcaagattctgaacgacaaggttctaaacattcacaccaaaataatgcgactaataatactgaacgtcaaaatgatcaggttcaaaatacccatcatgctgaacgtaatggatcacaatcgacaacgtcacaatcgaatgatgttgataaatcacaaccatccattccggcacaaaaggtattacccaatcatgataaagcagcaccaacttcaactacacccccgtctaatgataaaactgcacctaaatcaacaaaagcacaagatgcaaccacggaaaaacatccaaatcaacaagatacacatcaacccgcgcatcaaatcatagatgcaaagcaagatgatactgttcgccaaagtgaacagaaaccacaagttggcgatttaagtaaacatatcgatggtcaaaattccccagagaaaccgacagataaaaatactgataataaacaactaatcaaagatgcgcttcaagcgcctaaaacacgttcgactacaaatgcagcagcagatgctaaaaaggttcgaccacttaaagcgaatcaagtacaaccacttaacaaatatccagttgtttttgtacatggatttttaggattagtaggcgataatgcacctgctttatatccaaattattggggtggaaataaatttaaagttatcgaagaattgagaaagcaaggatataatgtacatcaagcaagtgtaagtgcatttggtagtaactatgatcgcgctgtagaactttattattacattaaaggtggtcgcgtagattatggcgcagcacatgcagctaaatacggacatgagcgctatggtaagacttataaaggaatcatgcctaattgggaacctggtaaaaaggtacatcttgtagggcatagtatgggtggtcaaacaattcgtttaatggaagagtttttaagaaatggtaacaaagaagaaattgcctatcataaagcgcatggtggagaaatatcaccattattcactggtggtcataacaatatggttgcatcaatcacaacattagcaacaccacataatggttcacaagcagctgataagtttggaaatacagaagctgttagaaaaatcatgttcgctttaaatcgatttatgggtaacaagtattcgaatatcgatttaggattaacgcaatggggctttaaacaattaccaaatgagagttacattgactatataaaacgcgttagtaaaagcaaaatttggacatcagacgacaatgctgcctatgatttaacgttagatggctctgcaaaattgaacaacatgacaagtatgaatcctaatattacgtatacgacttatacaggtgtatcatctcatactggtccattaggttatgaaaatcctgatttaggtacatttttcttaatggatacaacgagtagaattattggtcatgatgcaagagaagaatggcgtaaaaatgatggtgtcgtaccagtaatttcgtcattacatccgtccaatcaaccatttgttaatgttacgaatgatgaacctgccacacgcagaggtatctggcaagttaaaccaatcatacaaggatgggatcatgtcgattttattggtgtggatttcctagatttcaagcgtaaaggtgcagaacttgccaacttctatacaggtattataaatgacttgttgcgtgttgaagcaactgaaagtaaaggaacacaattgaaagcaagttaaattcatcttctgaatttaatatgctatgtaaatcgtgctactaacatggcacagcagatataagtagcatcacagtgttgaatttcaaaatagtaaagtgaaataaagcgcctgtctcattagcgaaaactaaagggacaggcgtatctgtttatgagcttaataaattgtatgaataatatggttgatcgaataactgtttatcatgatgataaattgagttttttaaaataatgatatattacaccattgttatagcgtttaagaaatcaacaactttacgataaatagtgattgcttcgtcattaggtctacgatcaaaatcatgctcgtttttattcacgcgttcaaatgttgaatgtggaacatgattcatgatatgttcgctttcctcaacgggaacatcataatcgctattacaatgcgcaatgaaaacaggtggaagtgttttaagttcatctggtgcaatattatattttgaatcagtataatcagcaatgttaatcatatttatccatttacctgtgccacgtgcataaacgtagattaaaaaacgttgtgcgatttgatcttgaacaaccggtgttggtgaagtgagttgtgcaatcattgtttcgtttacgctttgagctatttttgcgtaataactattagttgttttaaaaggttcagtgttgatgcgactataaccataaaaatcaataacaccatcaatatctctgtctcgtgcaattaatagacttaaatatgcacctgatgatctgccaaaggtaaaaatagggcaattagaatattgtgattgaatcgcatcgaatgatgcgtagacatcctcaataatgcaatcgagacttacttctggtaataaacgataacttagttgaattaaatcgtaatgttccgtaaggatatcgatatactgtggggataaatcgttagctttaccgaacattaatccaccaccgtggatgtagacaatagcgccttttgttggttgattttttgctttaataattgtgtaaggtaatgcaaatgcatctttagtaattactttatctttaatttcagtcacgatttaataggctccttatttttgatattgatgtcattataacactgtcttaaatttccatgaaaaatagtcttaagacgatgagtcatgataattctgttccaattgacgtaaagcgtcacgggtatgcttctttagaccttccccataatccatcattttaacaatatctttaaaagcagcatgtggaatggctaaatcttctaaatctgccatagaaaattcaagattgatatcatgtggtcgctgttcagcaagtttatgcacaaagtcaggttctgtgacaaaaggcgaagacatgccgaccatatctgcatgttgtaaagcatctaaagcagactctggagaattaatcccgccacttgcaattaaagggatacgacctgctaaatgttcatagacaatttggttaactggtcgaccgaaatgatcacctggtgtacgagacgtattttgataaatatgtcgaccccagctagcgattgctaagtattggatgtttgaaacgtccatgacccaatcgattaattggttgaactcgtcaatggtatatcctaaatcactgcctctggtttcttctggcgttgctcgaaatcctaaaataaaattgtcaggtgcttctttatcaatcacttcttgtaccgcacgcataacttctaaacataatcttgcacgattttttaatgagtcggcaccgtaatggtctgtacgtttattcgaaaaagttgagaaaaatgtttgaatcagcaaacgttgtgcaatcgaaatttccacaccatcaaaacctgctttaatcgcgcgtaatgtagcatcgcgatactgctgaatgatgctattgattttctcatgagacatggcgataacatcgtgttcaatcggtgaatgcaatgtcatagggcttggtccatacacctttccaaaatttaaaatggcttgatttgaaaaacgaccagcatgcgctagctggataatagcgaggctaccatgttgtttcatcgtagatgccatgttagttaatccagggatacaagcatcatgatcaatgttgaacccatattcaaacaattgaccataaggttcaatgtaagcagcgccggtgacttgcataccagctgaattagagcgacgtgcagcataagccaagtctgcttttgtaatatagccttcttttgttgatgcgtttacggtcattggtgataatacaaagcgattcgaaattttgatgccattaggtaagtggattgattgtaaaagtggtttgtatcggtacatactatgattccttttctattcaatattgttttcaaagtaccatggaaagaatgaataatcaatgatgaacagtcttgatagaatagaattggtacatggaaaacatttttaaaattgaactaatgaatggcatttgtaggtctgaaaatatgaatatgaaaaagaaaaataaaggcgaaaagatataaaagttaattgaaaaacgttatcatatacgtgggtatatgaagagggaatggtattaagaacgctaaaatgttatgtcggtttgacatgacaggataagtttggagatgacggattggttaaattaagcgtattagactatgccttaatagatgaaggtaaggatgcacaaaaggcattgcaagattcagtgacacttgcaaaattagcagatcgacttggctttaagcgaatttggtttacggaacatcataatgtaccagcgtttgcatgtagtagtccagaacttttgatgatgcatacattggcgcagacaaatcacatacgagttggctctggtggtgtgatgttgccgcactatcgaccttataaaattgctgagcattttagaatgatggcagcgttatatccaaatcgtattgatttaggtattggcaataatccgggtactactatggtaaagcaagctttagatggaataaatcctacatatgatagttacgatgaatcgatttcgttattacgtgattatcttacaataaaggataaaccaagtgcgcatacgttaggtgtccaaccacacattgatcattttccagaaatgtggttattaagtagtagcgcaacatctgccaaaatagctgccgaactaggtatagggctttctgttggcacatttttgctaccagatataaatgcgatacatgcagcgaaggataacattgatatttacaaaaaacatttccaagcatcaacgattaaaatggacgcaaaggtgatggcatctgtatttgtcattgtagctgataatgaagcggaagtagcagcattgcaacatgccttagatgtttggttattaggtaaattacaatttgcagaatttgaacattttccatcggtagacacagcgcaaaagtataagcttaatgatcgagacaaagagatgattcaagcacatcaagcacgcatcattgcaggtacacaagaacaggttagagcacaattagatgatttcattgctacgtttgaagttgatgaggtgttagtagcaccgcttattccaggcattgaacagcgttgtaaaacattaaaattactcgcggaaatctatttgtagcattttaaatagaagagaaaggatgaagataagatgaaaaagttagctaattatttatgggtagaaaaagtaggagatttgtatgtgtttagtatgacacctgaattgcaagatgatattgggacagtaggttatgttgaattcgtaagtccagatgaagttaaagtggatgatgaaattgtgagtatcgaagcatcgaaaacggtcattgatgtgcaaacgccattgtcaggaacgattattgagcgaaatacaaaagcggaagaagaaccgacaattttaaactctgaaaaaccagaagaaaattggttgttcaaattggatgatgtcgataaagaagcattcctagcattaccggaggcttaaatggaaacgttaaaatcaaataaagcgagacttgaatatttaatcaatgatatgcgtcgagagagaaatgacaatgacgtattggtaatgccatcttcatttgaagatttgtgggaattatatcgaggcttagcaaatgtcagaccggcattacctgtaagtgatgaatatttagctgtacaagatgctatgttaagtgatttgaatcgtcaacatgttacggatttgaaggatttgaagccgataaaaggtgacaatatctttgtttggcaaggtgatatcacgacgttaaaaatcgatgctattgttaatgctgcaaatagtcgttttctaggatgtatgcaagctaatcatgactgcattgataatattattcatacaaaagcgggtgttcaagttcgacttgattgtgcagagatcattcgacaacaagggcgcaatgaaggtgtaggtaaagccaaaataacacgtggatataatttgccagcaaagtatataattcatacggttggtccgcaaatacgtcgattgcctgtttcaaagatgaatcaggacttgttagctaaatgttatcttagctgtcttaaattggctgatcaacatagtttaaatcatgtcgctttttgctgtatatctacaggtgtatttgcttttcctcaagatgaagcagcagaaattgctgttcgaacagtagaaagctatctcaaagaaacaaattcaacattgaaagtcgtgttcaatgtatttacagataaggatttacaactgtataaggaggcattgaaccgtgatgcagagtagtaaatggaatgcaatgtctcttttaatggatgaaaagacaaagcaggctgaagtattgcgtactgcgattgatgaagcagatgcgatagtgattggaattggtgcaggcatgtctgcatctgacggatttacatatgttggagagcgttttacggaaaatttcccagattttattgaaaaatatcgcttctttgatatgttgcaagcgagtttacatccttatggcagttggcaagaatattgggcatttgagagtcgttttattacattaaactatttagatcaacctgtaggtcagtcttacctcgctttaaaatccttggtggaaggtaaacagtaccacattataactacgaatgcagataatgctttcgatgtagctgattatgatatgacgcatgtatttcatatacaaggggagtatatactgcaacagtgtagtcagcattgtcatgctcaaacgtatcgcaatgatgatttaattcgtaaaatggttgttgcgcaacaagatatgcttataccttgggagatgattccaagatgtccaaaatgtgatgccccaatggaagtgaataaacgtaaagcggaagttgggatggttgaagatgctgaatttcatgcgcaactacatcgttataatgcttttctagagcaacatcaagatgataaagtgttgtatttggaaattggaattggttatactacaccacaatttgtgaagcatccttttcagcgtatgacacgtaaaaatgaaaatgcactttatatgacgatgaataaaaaggcatatcgcattccgaattcaattcaagaacgtaccatacatttgactgatgatatctcaacattgattacaacagcactccggaacgatagcacaacgaaaaataacaacattggagagacagaagatgtacttaatagaaccgattaggaatggagaatatattactgatggtgcgattgcactcgctatgcaagtttatgttaaccagcatatctttttagatgaagatattttattcccttattattgtgatccaaaagtggaaattggacgttttcaaaatactgctatagaagtgaatcaagattatatagataaacacagtattcaagtagttcgccgagatactggtggtggcgctgtgtatgttgataaaggtgccgttaatatgtgttgtattttagaacaagacacttcaatttatggtgattttcaacgattttatcaaccagctataaaggcattgcatacattaggtgcaacagatgtgatacaaagcggtagaaatgatttaacattgaacggcaaaaaagtgtcaggcgccgcaatgacattaatgaacaatcgtatttatggcggttattcgctattacttgatgttaattatgaagcaatggataaagtgttaaagcctaatcgcaaaaagattgcatcgaaagggattaaatctgtgcgtgcacgtgttggtcatcttagagaagcactggatgaaaagtatcgtgatataacaattgaagaatttaaaaatttaatggtgacgcagattttgggaatcgatgacattaaagaggcaaaacgatacgaattatctgatgcggattgggaagcgattgatgaattagctgataaaaagtataaaaattgggattggaattatggtaagtcacctaaatatgaatataatcgaagtgaaagattatcatcaggtactgtagatattaccatttctgttgaacaaaatcgtatcgcagattgtcgtatttatggggatttctttggacaaggtgatataaaagatgtggaagaagcattacaaggaacaaaaatgacaagagaagatttaatgcatcagttaaagcaattagacatcgtttattattttggtaatgttacggtagaatcattggttgagatgattttaagttaatattgtttaggcgttaatgtcacaccctcaatgaatatgtgtatttgcttttaaaatggtgactatgtagttatgtaatttgatcatacgattgaaaatgaatttagttaattagcaaagacatcatatttatagcgtttgtgtttattagtgattgggtatttgaaaatggttaatgatagtttttaaaggaataaattcattttcatttatataagtaagattaaatactagctactaaagtctatttatatacgtcaaaatataatgactgctataatgagtaatcaatagacacaaagaggagattatgtgatgaataataaagtattagtaaccggtggtacagggtttgttggcatgcgaattatttcacgattattagaacaaggttatgaggtacaaacgacgatacgtgatttaagtaaagctgataaagtaattaaaacaatgcaagacaatggcatttccacagagcgattaatgtttgtcgaagcggatttatcacaagatgaacattgggatgaagcaatgaaagattgtaaatatgtcttgagtgtagcatctccggtgtttttcggtaaaacagacgatgcagaagtgatggcgaagcctgccattgaaggcatacaacgtattttaagagctgcagaacatgctggcgtgaagcgtgtggtgatgactgcaaactttggtgcagttggttttagcaataaagataaaaattcaatcacaaatgaaagtcattggacaaatgaagatgaaccaggcttatcagtatatgaaaaatcaaaattgttagctgaaaaggcagcgtgggattttgttgagaatgaaaatacaacagtagaatttgccacaatcaatccagttgcaatttttgggccatcattagatgcacacgtttcaggaagctttcatttattagaaaatttattgaatggttcaatgaaacgtgtaccgcaaattccattgaatgttgttgatgtgagagacgtagctgaactacacattttggcaatgacaaatgaacaggctaatggcaagcgatttattgctacagctgatggacaaattaatttgttggaaattgcaaaattaattaaagaaaagagacctgaaatagctcaaaaagtttctactaaaaaattaccagactttgttttgagtctaggtgctaaatttaatcatcaagctaaagaaggtaaacttttattagatatgaatcgaaatgtaagtaacgaacgtgcaaaaatacttcttggttgggaaccgattgcgacacaaaaagaagcaattttagcagctgtcgatagtatggctaagtatcatttaatataatacaaaacaccgtccataagtaagtggctttcctcttgataaaagaggcattcactcaatatgtgacggtgttttatatatttacgttaacactattgctgtggcttttgacggccttttaataaaattgctgtcgcacctacgataataataaatagaatcgcaccaaataatcccatatattttactgcgttaccgaacacgataccgacagctaaaaagtctgtatctgagaatgttgttgcagcaccacctaattcgcctaaaaatggcaagaataataatggtaaaaacgtgattaggacaccatttagagcggcgccagcaacagcacctttaataccgcctcttgcattaccgaatacagcagccgttgcacctaagaagaagtgtgcaactacgccaggtaaaatgacgacgccaccaaataagaataagataaacataccgatgacacctgtaataaagctgacaaagaatccaattaatactgcattttgtgcataagggaacacaatagggcagtctaatgcaggtttagaatttggtacaagcttttcagaaatccctttaaatgctgggacgatttcagctaagattaagcgaacgcccgttaaaataataaatacaccagcagcaaatgtcacaccttgaattaatgaaaaaacaataaagttttgaccattactaatagattcgtgtacataactaacgcctgcaaataagcatgcgatgaagtaaagtaatgccatcgtaatcgagatactaattgtactttctcgtaagaaacttaagccttttggaaatttaatctcttccgttgatttagacttacctttgaataattgacctacagcacctgcggcaaagtaactgattgagccaaaatgacctaaagctacttgatcattccctgtaatttttcgcatcgtaggttggagtaatgcaggtaagactgccatgattaatcctaatacgagtgcgccgataacaatcgttagccagcctttaatatgactgactgttaaaatgattgctaaaaacgcagccatgtaaaatgtatgatgacctgttaaaaagatatattttaaattagtgaagcgggcaattaaaatattaacaatcatgccacagaccatgatgagtgcagctgttgtaccaaaatcttttaaggctagtgagacgatagcttcgttgttaggtacgataccttgcacaccgaatgcgtgttggaatattttgccgaatggctcaagagatcgaacgacgacatcagcacctgcacttaaaattaagaagcctaatatcgttttaatggttcctgaagtgatcgttgcggcaggttttttctgaacgattaaacctataaaggcaatcagtgcaacaagaatggctggttgacttaaaatatcgactataaaattaaggattgcttgcataggtcgtacctcctttaaatcatgttaagttgttgtaatttttctgagagcttttgttgtaattcagctttgtctaaaatattatcaagaactaagacatcccctagacgttcggcattttcagctaaatctctaccacaaataaacaagtcagccatctctggacttgctgtcataatgtcactatgttcaacttcgatatcagatggtgcattaagttgcctaagtgcttcttgtgcgttcatttctaccataaaactacttcctaaaccgtggccacatactactaaaattttcatattaatcatgctcctttaaaatgtttttaatgtcttgtgcgtttgttgcagttaatagttgctggactgtttggttatcgcccagtacggttgctaaattttgtaatacagataagtgtgaatgattgtcgatggcactcaatacaaaaatgagtgatgcgtagtgattttcatcacagaatgccacatgttggttcaactttaatagacttaaaccaacttgatgtacgtcattgttcggtcttgcatgtgcaattgcaatttcaggtgcgataacgatataaggtccaagttcattaacgctatcaatcattgcttgaacatagccttgttcaataatttgttcttgtagtaatggctgagaagctatagttatagcttcagtccaatcatttacttgttcttttacaatgatgcgtgttgttgacaaaatgtctaatgacacgttattaagcctcctttgtcatagttaaagcaatgtgttgtttaattttaaaaatattcccatctaagaaatcttgtcgatataagtcgctgcttaagcattcgcttaactgtcccaatgcctttaaatgtgcattggggtggtccgttgctaatgtaattacaaggtgaacgggatcgttagctttactaccaaagataatcccttcagtgaaatatgttagtgcgaaacctacaccattctgtacataatcagtaccagcgtgaatacgtgcaatatgtggactaatgaccatatatgacccgaattgttcaaattgttttaaaattgcagctgtataatttgaatagacaatgccatcattgattaaaggttgcacagccactgcaattgcggattcaattgataatggttgtttatttataatgatgcgatgttcaggcaataaatctgcgagtgacttgccatcagttgccattttcatgactcgttgttctcttgagtcattgataatttgattcaatttttgacgagattgttgattgataaatggatcgacatgaataactggtacagctgatatttcacaaggtactgttgaaatgacataatcaatgttatcttgcaataatcgactttcttccaattgataaatggaataggcatcccaaatgtgaaactcaggatacaggtgatttagttttgattttaaaagttgtgacgtgcctataccagaaccacatagtaagacaaccttaatcattgattgtttatgtgttgcaacacgctctatacttgatgcgaagtgaattgtaatgtatgttaattcatcttcgttgaagcgaatagcagcatcttgttcaattggactaatatgcttgctaacggcttcaatgatttgaggatagcgacgcataacttcttgcctcaaaggattaggttgtagcatatcgtatttaatacgatgtatagctggtttgatatgtgtgatcagactggtatgtaacttgttatcttttgacatatcaatgcctaattcttggctaacacaagtaatcaattcatgtatattttgcgataaatcatggtattcaaaggtaattgaagatgctgtatgttcagtcattttagagcctagtaaatgtaacgtgataaagataatttcagactctggaaatgtgacattacaactgcgttctaagttttctatcatttttgaagcaatagcatactgactagtatgtcgccatttatcaatttcattgataggtatatcgaacgaaaaattttcatttagacgctgaatggcaatgagtatatgatagattaagccatcgatagccgactgaactaaatgataattttcactatttaatgtcttaataatggcacggcgaaccaatgcgattgattctgaattaaagatatccgcctctataaaaggtgcagcttgtttcatatattgatgtataaagtgtgcatacgctttacgatagtgatcttcctcaccaataatattgaatcctttattgtggacataatttaactttaaatggtattgatctagttgggcctgtatcattttaatatcatctgcaattgtccgacgcgaaacattaacatcttgcgcaagttgctttgttgaaacaggatcggttgtttcgaataactttaaagcgatatgtgtgagtcgttcatcttttgaaaaatgaatttgatttgttagattgtgctctaattcatttaatagtgtcgcgtgagctgttgttactttgatgcctgcagctttattacggctgacttggtaatgataagtttcagcatattgctcaatatatgctatatcatattgaatggtacgaggtgatacaccaagttgattagcaatggtattgattggaataaacgtttgctcatgaattaaaagatacaaaatttcgatttgtctataacttaacaacgtaatatcctcctatttgtaattgtaagcgatttcttaaaaacgtagatatgcaatctctttcatattttaatccgaaaaattgcatatcaaaatgtttatggcgcaagattttataggaacttttaaaataaattagatattcatgttgacaatttaaaaatgtcgcagtatatttagttagacatctaacgaaatggtggtgcaataaatggaattcacttattcgtatttatttagaatgattagtcatgagatgaaacaaaaggctgatcaaaagttagagcaatttgatattacaaatgagcaaggtcatacgttaggttatctttatgcacatcaacaagatggactgacacaaaatgatattgctaaagcattacaacgaacaggtccaactgtcagtaatttattaagaaaccttgaacgtaaaaagctgatctatcgctatgtcgatgcacaagatacgagaagaaagaatataggactgactacctctgggattaaacttgtagaagcattcacttcgatatttgatgaaatggagcaaacactcgtatcgcagttatctgaagaagaaaatgaacaaatgaaagcaaacttaactaaaatgttatctagtttacaataaatggtaagtgtgactggtagaaatcagtcactttatctttaatattatagttagatatctaattattagtaagctaattattgaaaaagacaaggagtattgaacaatgaaagacgaacaattatattattttgagaaatcgccagtatttaaagcgatgatgcatttctcattgccaatgatgatagggactttattaagcgttatttatggcatattaaatatttactttataggatttttagaagatagccacatgatttctgctatctcactaacactgccagtatttgctatcttaatggggttgggtaatttatttggcgttggtgcaggaacttatatttcacgcttattaggtgcgaaagactatagtaagagtaaatttgtaagtagtttctctatttatggtggtattgcactaggacttatcgtgattttagttgctttaccattcagtgatcaaatcgcagcaattttaggagcgagaggtgaaacgttagctttaacaagtaattatttgaaagtaatgtttttaagtgcaccttttgtaattttgttcttcatattagaacaatttgcacgtgcaattggggcaccaatggtttctatgattggtatgttagctagtgtaggcttaaatattattttagatccaattttaatttttggttttgatttaaacgttgttggtgcagctttgggtactgcaatcagtaatgttgctgctgctctgttctttatcgtttattttatgaaaaatagtgacgttgtgtcagttaatattaaacttgcgaaacctaataaagaaatgctttctgaaatctttaaaatcggtattcctgcatttttaatgagtatcttaatgggattcacaggattagttttaaatttatttttagcacattatggaaacttcgcgattgcaagttatggtatctcatttagacttgtgcaatttccagaacttattatcatgggattatgtgaaggtgttgtaccattaattgcatataactttatggcaaataaaggccgtatgaaagacgttatcaaagcagttatcatgtctatcggcgttatctttgttgtatgtatgagtgctgtatttacaattggacatcatatggtcggactatttactactgatcaagccattgttgagatggcgacatttattttgaaagtaacaatggcatcattattattaaatggtataggtttcttgtttactggtatgcttcaagcgactgggcaaggtcgtggtgctacaattatggccattttacaaggtgcaattatcattccagtattatttattatgaatgctttgtttggactaacaggtgtcatttggtcattattaattgctgagtcactttgtgctttagcagcaatgttaatcgtctatttattacgtgatcgtttgacagttgatacatctgaattaatagaaggttaaatatttcgtccacttctggctgagtatatttcggtcggaagtgtatttttcgaaaaaaataaatatatgatacgattatgaaaaaataaagtgagattggcatatgtgtaaatctaaaatactgttgaaaaatatttttagtgaagaatcagaagttaaagatttaactgaagaaaaatataatcaagattacgaagcattaacatttagctttaaagaggaaacatatcaaagtaggttagctaagaaaacaccgactaaatcgggatatttcgtgacatgttggacaaaagacgaagataattataatcggccatacaaaattgaagagtttgctgattacctgattgttgctgttatcgatgatgaattaaatggctactttctatttcctagggaattattggtagaaaaaggtatcttagcttcatctaagtatcaagggaaaatggcttttagagtttatcctaagtggtgtaatcaattgaataaaacagcagggcaaacacaaaagtggcaatgtaaatatttttttgaatactaataaaaagtcatatggttgaacttataagagatgaatatatcatctttcgataagataaccatatgactttattttttatcatttaatgatgaacggtttcttgtcctactttattccaagtgaggataaagctcaacattgcaaacacactgattgctgttaataaaataaaaccgacatcccatccgaatttatcaactacagcacctaagacgatattggccattacagcaccaaacagataaccaaataatcctgttaatccagctgctgtgccagctgcttttttaggtacataatctaatgcttgtaaaccaattaacataactggtccatatattaagaaaccaatggcaattaatgagacattgtctaaccaagcattgcctggaggatttaaccaataaattaatacaaatactgtgacacctaacataaagaagaaacctgcaggtccacgacgacctttgaataatttatcagaaatgtaaccacataataatgtaccaggaattccagcccattcgtataagaagtatgcccaacctgatgcttttaagtcgaaatgtttttcttcacttaagtagactggcgcccaatcaagtacaccataacgcacgaaataaacaaatatatttgcaaaggcaattgcccatacccatttattgtttagtacatatttaaataaaatttcttttgtagttaattctgtttctaatgttttcttatcgcttgtagcaaagtcatttttataaatttcgattggaggtaaaccttgagattgaggtgtgtctctaatcaatacgtatgaaattgctgcaatgataagtgctaagagtgcagggtaaatgaatacaccttcgaaaccttttaaataaccaaagttgataaatgctgttgttgtaataccccaagcagcaataggtgccataatacctccaccaacattatgcgcaacgttccaaagggcagtcttacttccgcgttcacttacactaaaccagtgaacgagaacacggcctgaaggtggccagcccataccttgaaaccatccatttaagaataataggacaaacataataccgatacctgatgtaaagaacggtacaaatcccattaacaaattgacgatagcagtgagtgctaatccaagaactaagaatatccgagcattgctccgatcacttacagtacccataaagaacttactaaatccatatgcgatggaaacagcagaaagtgcaaaacctagttccgcttttgtaaaaccttgctcttgcaatgccggcatcgctaacgaaaagtttttacgtaataaatagtacccagcgtaaccgatgaaaataccaagaaatacttggagacgtaatcgtttataggtatcatctatctgattttctggcaaaggcttaatatgctttgcaggtttaagaaaattcataaaatcctccttaatatgtatttatatgcattttgtgcgataaacttatattagacatgtatgaaagcgttgtcaatatacttttgtgaaatcttgcatatttagttattgaagtattttataaacatttagaaaaaataaattgctacacataaatttataattatgcaattattatgtcgttatacatactagctgtgtatctacgaatgagtacaaacatatttttatttgcagaaaaggggtaaatggcatataactatcttttttatgtaagctggtataaaatttatactaataggagggatagtatgaatatagtagggcatcatcacatatccatgtatacaaaagatgcaaaacgtaataaggatttttacacaaatgtccttggattacgattagttgaaaagtcggttaatcaagacaatccttcaatgtatcatttgttttatggggacgaagtaggtacagccggaacaattttaagcttttttgaaattcccaatgcgggtcataagcagccaggcactgaaacgatttatcgattttctttattagtaccaaatcaagcggcacttcattattttgaaaaacgccttgataataatggtattacgtctgaacgtttgtactatcttggacaagaaggtgttgtctttaaagatgaagacgacttagaaatcatattgcttgttaatgatagttttgaagtaccacatcaatggcaacataacgtttatagtgaaatacctcaagcatatcaaattttaggaatagggccagtcgaattaagagttagaaatgcagcgcgtacggtagaatttttggaaaatgtcttaggttatcgcaaaagagataataaatcattcgatgtgctgacattagcaccacaaggtttatattcggattttgtagttattgagcaacagggacaacgtgaaagacctggacgaggttatatccatcatattgcagttaatacaccactaatgagtgatttagatgcaatttacaagaaattacaacaacaaccacaaagtaattcaggtataattgatcgctatttctttaaatcattatactatcgccataattcaattatgtatgaatttgcgactgaagcgcctggatttactattgatacacctgttgaacaattaggaagtcaattgaacttgcctgactttttagaagcagaacgtgaacaaattgaaagtaagttacacgaaatataaaggagaatgtttaatggccaaattagaaatgaataaaaatacgcctcttgagtttggtttgtattccttaggtgatcatttattgaatccattgaaaggtgaaaaagttagttatgagcaacgtattaatgaaattattgaagcaagtaaattagcagatgaagcaggtattgatgtttttgcagttggtgaaagtcatcaggagcattttacaacacaggcacatacggttgtgttaggtgcaattgcccaagcgacaaagcatattaaagtttcaagttcttcaacgattattagtgcaacagatcctgtaagagcatttgaagacttcgcaacattagatttgatttctcatggtagagccgaaattgtggctggtagagcatcaagaacaggtatttttgacttgtttggctatgatttaaaagactatgatgaattgtttgaagaaaaattaggtttacttttagagttaaataaaactgagcgtattacttggtctggaaaatatcgtccagaacttagaaatatgaaaatattcccaagaccaatcgataatacattgccaatatggcgtgctgttggtggtccacctgcaagtgctatcaaagcgggaaaacaaggtgtgccaatgatgattacaacccttggtggcccagcaatgaactttaaaggttctatagatgcttatcgtcaagcagcaactgaagcaggtttcgatgtttcgtctaagtctttaccagtaagtacagcgagtctgttttatacagctgaaacaactcaggatgctatgagagaattttatccacatttgaatacagggatgtcatttattcgtggcgttggttatccaaaacagcaatttgctaattcgtcagattatcgagaagcgctaatggttggaagtccgcaacaaattattgaaaagatattgtatcaacacgagttgtatggtcatcaacgttttatggcacagcttgattttggcggtgtgccatttgaaaatgttatgaagaatattgagttaattggcaacgaaattataccggcgattaaaaagcatttatcaaaataggaggggcgtcatcatgaatattgtattattgtcaggttccacagtaggttctaaaacgagaattgctatggatgatttaaaaaatgaactagaagtcatcaatgagggacatcaaatagagttgatggatttacgagaacttgaattagaatttagcgttggaaagaattatctagatactacaggagatgtatataaattaacgacgtcgttaatgcaggctgatgtgatttttattggttttccaatttttcaagcttccatccctggtgctttgaaaaatgtatttgatttgcttccggtcaatgcgtttcgtgacaaggtaataggacttgtagcgacagcaggttctagtaaacattatttaattcctgaaatgcatttaaaaccaatattgagttacatgaaagcacatacgatgcaaacgtatgtatttattgaagagaaagatttttcaaatcaacaaattgtcaatgatgatgttgtatttcgtttaaaagcgttggcacaatccacaatgcgaactgccaaagtacaacaacaagtgtttgaagaagaaaacaaccaatacgacttttaaagtataaaaataagacgctcggcacactaaatttgtaagtgtttgagcgtcttttcatattaactatatagccaatgaacgacgataaaggcaagtgatgacaagcatattgaggtaataatgattgtcataagcggtttaagtgcgcgatttttaagatctttaaatgccacatttaaccctaaagcaaccatggccattaataagcaaattgttgatacagtatttaaaatatttagcaatgctgacggaatagttacatatgtattcactaatgccataatgacaaatccaattaaaaagtatggaatgcttattcgacctttgctagatgattctgatgaacggaaacgcataattaaaataagtacgatggttaatggaatcagtaagaatactctgccaagtttgcccagcagtgcaattttaagtgcatcactaccaccaaagccgccagctaagacaacatgcgcaatttcatgaagactaacgccggaccaagcgccatagacagttgtcgtcattgaaaagatagcatagatagctgtatatataagtgaaaatatcgtaccaatcaatgcgatgataccgatactaatagctgtatccttttcacgtgatttgaatattggagctactgcagcaatagcggcagcaccacaaacgcctgtacctacacctagtaataatgcgatgtttttgtcaccatgtaacagtttgttgacaaagagcatcattacaatactaaaaataacgacacctacatcgatggctaatagtctactaccttgaccgataatatcgaatatattgagtttaagtccatataggatgattgcaaatcttaataaatatttagatgaaaacgtaatacctgagctatattgctcaggatatcctctaaagtgacgatatagaatagcgattaatatcgcgatagttaatgcgccaaccttatctaagattggcaatttagctgctaaaaagctaaataatgcgactataaatgttaatgatagtccaatcataaaatgcttgtttttcaatgatgccatgagcagtgcctcctttaatagcattttagcactgttttgtcgtatttttaaatataaatttggaatgaataataaagtagtgattaaattaagttgtgtgataggtatcaaggacatcaaccaaagtaataggcactacaacgcttattggcggggtcccaacaaagaagctgacgaaaagtcagcttacaataatgtgcaagttggggatgggccccaacatagagaaattgggtccgtaatttctacagacaatgcaagttggcggggccccaacatagagaatttcgaaaagaaattctacaagcaatgcaagttggcggggccccaacaaagagaatttcgaaaagaaattctacaagcaatgcaagttggggaaggacaacaaatttaagatacaaggcgtaatattaatatgttattattatgataatttacagaattatatgaaaaatgaatgaggatgtgatggtatgtttggaatgaaagtgaatgaacaaataacattaaaaattttagaagctcatgacacagaagcgcttttcaatttagtcaatcgttcaagaaattcacttagggaatggttaccttgggtagatgcaactgagcaaccatcagatacgcgtgcatttattaaaagaggacttttgcaatttgctgatggtaatggatttcagtgtggcatttggtatgaaggaacgttagttggtgtcatcggtttacatgaaattaatcacattcacagaaaaacttcattaggatattatttagataaacaatttgagtgtcatgggattatgacacaagcagttgaggcattgataaagtattgtttcgaagagcttgacttaaaccgaattgagattagtgccgcagttaataatgaaaaaagccgagctattcctgaaaggctgggatttactagagaaggtatgttacgtgacaatgaattactaaatggtatttattcatcgagttacatctatagtttattaaaatcagaatacgaccaaaaatgacaaattagacttacaaaagagtgatgacatttaaaatggcagcgctcttttatttaatttttgaaaataaaaggttgttgacagtattattttataacaatataatgattttgataattattatcaactagatgatgtttatgggaggatgctttaaaacagccgttttaagtgtaatgtattattttagcgtgtagggaatgcgaaaataatatttataagaacacatctatggggataatagaatttctataatgaggtgtcaaaatgaaaaagttaacaacgctattattagcatcaacgttattaattgctgcatgtgggaacgacgatagtaagaaggatgattcaaagacatcgaaaaaagatgatggtgttaaagcagaattaaaacaagcaacaaaagcatatgataaatatactgatgaacagttaaatgaatttttaaaaggtacagaaaaatttgttaaagcgattgaaaataatgatatggcccaagcaaaagcgttatatccaaaagttcgtatgtattatgaacgctctgaaccagttgcagaagcatttggagatttagatcctaaaattgatgcacgtcttgcagatatgaaagaagagaaaaaggaaaaagaatggtcaggatatcataagattgaaaaagcattatacgaagataagaaaattgatgatgtgactaaaaaagatgcacaacaattattgaaagatgcaaaagaattgcatgccaaagctgatacattagatatcacaccaaaattaatgttacaaggttctgttgacctattaaatgaagttgcaacttctaaaatcacaggtgaagaagaaatttattcacatacagatttatatgattttaaagcgaacgttgaaggcgcacaaaaaatttatgacttatttaaacctattttagagaaaaaagataaaaaattaagtgatgatattcaaatgaacttcgataaagtgaatcaattattggataaatataaagataacaacggcggttatgagtcatttgaaaaagtatctaagaaagaccgtaaagcatttgcggatgctgttaatgcattaggagagccactaagtaaaatggctgtgattactgaatgacaaattatgaaaaagttaacgatagtacgcaattttcaagacgtacatttttgaaaatgttaggtattggcggtgccggtgttgcaattggcgcaagtggtgttggtagcatgtggtctttcaaatcaatgttcaatacaccagaagatccggaaaaagatgcgtatgaattttatggtaaagtgcaaccaggcattaccacacccacgcaaaaaacatgcaatttcgttgcgttagatttgaagtcaaaagatagagatgcaattaaggcaatgtttaaaaagtggacggttatggctgatcgtatgatggatggtgatacagttggcaagacgagtaacaatcctttaatgccaccagtagataccggtgaatcgataggattaggtgcaagcaagttaacgattacctttgggattagtaagtctttgatgaagaaaattgggttatctagtaaaattcccgatgcctttaaagatttaccgcattttccgaatgatcagttaatagacgattacagcgatggtgatattatgattcaagcatgctcaaatgattcgcaagtatcctttcatgcggttcataatttagttcgtccatttcgagatattgttaaggtacgttgggcgcaatctggttttatctctgctaaaggtaaggaaacacctagaaatttaatggcatttaaagatggaacaattaatcctagaaagagtaatcaacttaaagattatgtgtttattgatgacggatgggcgaaacatggaacttattgtgttgtcagacgtattcaaatacacattgaaacgtgggatcgtactgcgctggaagaacaagaggctacatttggtcggaaacgacatagtggtgcgccgttaacaggtgggaaagagtttgatgaaattgacttaaaagcgaaagatagtcatggcgagtatattattgataaagatgcccatacgagactagcgaaagaagcaaatacgtcaattttacgtagagcctttaattatgttgatggcacggatgaccgcacaggtaacttcgaaacaggcttgttgttcattgcttttcaaaaagcgacaaaacaatttatcgatatacaaaataatttaggtagtaatgataaattaaatgaatatattacacatagaggttctgcttcatttttagtattaccaggtgttagtaagggaggataccttggtgaaacattatttgactaaatttgtagcaatgctaataactgctgctatggtgtgtagctttgggttactgaaaagtcaggcagcagaacaacaaagtattagtgatgtatatagtgtgataacggatgcgaaatctgcactttctaataattcgatatcgaatgacaataagcagaaagcaattgagcaagtggtaagtgcagttaagaaattatcgcttgaagataatagtgaaggtaatgctgtcaaatcagatgtgagaaagcttgaagatgcaaaagcgaatgatgatcaaaaagatacactttcgcaattaacgaagtcattaattgcttatgaagagaaattggctagtaaagatgcgggttctaaaattaaactattacaacagcaagtcgatgccaaagatgctgcgatgacaaaagcgattaaagataaaaataaagcggaattagaatctttgaacaatagtttgaatcagatttggacaagtaatgaaacagtgattcgcaattatgacgcaaatcaatatggacaaattgaagtcgcattattacaacttagaattgcaattcataagtcaccattagatacggcaaaagtgtcacatgcttggacaacttttaaatcaaatattgatcatgtcgataaaaaaagtgatacgtctgcaaatgatcaataccgtgtatcacaattaaatgatgagttagagaaggcgattaaagctatcgacgacaatcaattgtcggatgctgatgctgcgcttacacattttatagaaacttggccgtatgttgaaggtcaaattcaaactaaagacggtgctttgtatacgaaaattgaagataaaataccatattatcaaagtgtattagacgaacataataaagcacatgtgaaagatggcttagtagatataaacaatcaaattaaagaggttgttggccatagttatagctttgtcgatgtgatgattatctttttacgtgaagggctagaagtgttgttaattgtaatgacattgactaccatgacgcgtaatgtaaaagataagaaagggactgcaagtgtgattggtggtgcaattgccggacttgtactgagtattatcatagcaattacgtttgtagaaactttagggaatagtggcattcttcgtgaaagtatggaagcgggattaggtatcgttgcggtcatattaatgtttatcgttggtgtttggatgcacaaacgttcaaatgcaaaacgttggaatgacatgattaaaaatatgtatgctaatgcgattagtaatggtaatttggtattgttagcgacgattggtttaatatctgtgttgcgtgaaggtgtcgaggttatcattttctatatggggatgataggtgagctagcgaccaaagattttattattggtattgctttagctatcgttattttaatcatctttgcgttattatttagatttatcgtcagattgatacctatattctatatatttagagtgttgtcgatttttatttttattatgggattcaaaatgcttggcgtaagtattcaaaagttacaattattaggtgctatgccgagacatgtcattgaaggattcccaacgattaactggttaggattctatccaacttatgaaccattgatagcacaagctgcctatattatggtagttgctatcttaatctttaaatttaaaaaataaaaaacaggccgagtgcctgtttttttgttgcgatgttggaaatattcggtattgcagtataacgataatcacagcattaattcgtataaggttaatgtgttggcggtttgcctcggcatgtgaacttaacaatgaacatgctgaactcaaagagcaatatgagtggcaatgtaagtaatatatttaatgttaaatcgggtggtgcaatgatacttgctaatacaaagcaagcgaaataaatatattttcgataatgcttcaatgatgtggtatctataagaccgaattttgcaagtcctatgaataatattggcaattggaataaaatgccaaaagtgaataaccaacgtataagttcaactaaatacgctttaaagccaatcactggcgaaatgttcaaagtggttgataattttaacgcgaattgaatgatcattggaaagccaacataaaatgcaaaagcgacaccaaaaataaataaaagtacgctaaataagctatatttataaataaattggcgctcattattatgcaaaccaggcgcaacaaacgcccacaattgataaaacataaccggtgaaatgagacaaaacgagatgaaaaatataatcatcacgtatatttggatcatttctgtgaatgaaaatgcatgtaaggacacatgtgctcgagtaatatatgatatgactaatgtcatccaccaaaatgatgaaacataaacgatgatgactgtgacgacgaacgacaatagtattttaactaaccgttggcgtagttcgctaaaatgaactagtaaggtgtggtcagtgctattgctctcgctgttgtttcgattccttactgggtgtgtcgtgagactctttgtctaaatcttctgttgcagatttaaattcttttaaagtagaaccgatagcacgaccaaattgtggtaattttttcggaccaaaaataattaaagcgataatgctaatgacgacaagacttgttgggcctgtgatgcctaaaataaaagtgttagttatcatgataatcaacctcactcataagtagtatatagtatttactttataccgaacgataatgattatcaataaaattttatgaaataattaaaatgttgctataaatatagtttattgagggattaattctgaaataacagcttggtcttgcaagtcgatataagtacaagtgcccgcttgaatatcgatatgccatttataaatgccagcttcagccatttcatcacaaaatgtttcaaaatctgtttgcccttgttgatgtcttgttaagacgtcttgaactattgttttgtttgatttttgagcaacaggatgattactttttacagatgacgtaacgatatcatcttctgattgatgtacgtatgttgctgtaccatcttgaatattaacaatattgtacgtcatacccatatccttaaatgctttgaatagttttggaaaatcaacaccagtaaattgttgatgtgcttgttgaattgcagataatgtaaatgccataataatctcctttgaatgatttgatttagtgaaaatgcgtgcatcatactaaaattagaatgctgttaattatgcaggaaggtgtaacgaaagtaaacaattatgacttgtaggcgttgaggtgtttgtttcaaaatgtcatacataggtggacaatcatatttttttgtgtggatttgacaaatatagttgtcaaaaagacgcatatcatttacagtgtagttaaggagttgatgcgatgtgcgtaatcgattgaaagaattacgagcacgagatggcttaaaccaaacgcaacttgctaaacaagcgggcgtttcaagacaaaccatatcgctaattgagcgaaacaattttatgccatcagtattaacggcaataaaaattgctcgaattttcaatgaaacggtggaaactgtttttattattgaggaggatgaggtatgaaaatactaagatatatcggatatcttttactaggtggacttgtagggggtatcattggtggaattttaggtaattttgatggattgggtattgagaacttgacgtttgcgacatataccaatgtcgttgtaatatcgattgttgcgacgattattatcatattggtagaagccattgttttgatgaatcaaagacgtgcattgaagtataagcgacttgtagatgaagaggtagatatcgatgcaacagatcaatatgaattgcttgcgaatcgttatgttttaaatggaagtatattaagcgttatacagacaattattgcctttgtagtgttactaatttttgtggtagggcaagctgcagcaaatgcaatgctattctttttaataccattttttgctagtgctattttcaatacacaatttacactgtttaatagaaaatttgatgacagaatgccaaaaattgcagataagaattacactgaaaagcgattggaaatattggatgagggtgaacgccatatagaattaattgcattatttaaaacatatgcgatcaacttatccatattgatactagccattatttttatagggtcttattcaattgctacaggaattaatcaaagctttagtttgctacttatcattgctattttcatatataacgcctttagttatttattgaagagaagacgtttttattaaaattaaacaaagaggagcatggatatgacaacattgttaaacgtagatagtgtgaacaaacaatacaaagattcggattttaaattgcaagatgcatctttaacgatttctactaatgagacagttggattaattgggaaaaatggctcaggtaaatcgacattaattaatattctagtaggcaatcgacataaagataacggtagtattgcattttttggagaagaacatgctgcggatgatgtcgaatataaagaacacataggtgttgtgtttgatgatctgagagtacctaataaattgactattaaagatattgataaagtatttcaatctatttatacgacttggaatagtcaaaaattctttgatttaatcaaatatttcgagttaccactacaaactaaaattaaaactttttcaagagggatgcgaatgaagatagctttaacaattgcgctttctcatgatgtgaagttattaatcttagatgaagcaactgcaggtatggatgtttctggacgagaagaagtaatggaactattagaagattttgtcgctcaaggtggaggcatcttaatatcatcgcatatttctgaagatatagaacaattagcggataaattagtgtttatgaaagatggacgaatgattttaactgaacagaaagatatacttttagcacaatatggaattgttacgacaggagataaagatgttgaaattcctaagcatttaatcattgcttctagattgtcaaaggggaaatatcaaattttagttaaagattatgcagaaattgaaaatgcagagcctttaaaacacattgatgacgctacgaaaatcataatgcgaggtgaagtataatgaaaggtatgttcctaagtagtttttatgcaacgagaaagcaaacatatatttattttatagtcgctatcatagctgcgggatactttgcagtatttaatccgttgatgagttctgcaatggctggggttatgttaatcacacccattactgataatattaaacatgaaaaagactcaagatggatgtattatgtatctacgttaccggttaaacgtagtgattatattaagtcatactttgccttttatttaatcttattcggtgcaagtttaatgattggattagttgtgactacaatcgtgacccaaagtgtgatgattggtattatgtcaggtttaatgagttttggtatcataggggcatactctatcattttcccattgacatttaaatttggcgctgaaaactctaatgtcattatgatatttgcatctatactactacttatttctttcgtggtctttttctttatatatggtatggttagtggtgcatctgcattagaatttgaaaaaattagcactgaaggatggctagttgtcatagcatatgcggtcattggtatagttataacgagcgtttcttatatattgtctattaaaatttttaacaaacaagaactataattgtcgattttggtgatgatagtatttgaaataatatttagagcaggtgataaatctttacgattgtcatctgttctttttggtgtggaatgaaatgtgggggataagtataggtgacatatctatattgatttatttgttttgaggtggttatgttgtgtgggaattatttccttttatagtgaggattaacgtgtatatattatttagtatgttgctgaaatttatttgtgtgtatcaattgatgatggtatatgccaatgatttccttggaaatatttaaaaacctcgatcatgtagcataactgaatccaaaagtataatgtgaagttcgacacttttggattcagttcaaatactttgaccgaggtgaatactatttattcatttttattacgtagacgttgatttttaaaatagatgagcatgatgcagaaagtcgcaacggataccgaaataatcattacttggtcatgccctttaaagataaggctgatgatatatgaaactacaagtatgcctagtgaagaagaaatatattttgcgtttgtcagttcattatggaaataaggcgtgattaaccataatccagtatagaatattaaaacactgatatacatcatattaatttcaaacaagtcatttagtttattgttattactaaaaacaattgcggcattaatcacacctaaagcgatattgattaatagatgcgtatacgataaacggaaaccgatagatgacaatttatgattaatgtaattttcagtaatgatccaataaacaccgaaaagactaattaaaatcataaattggaatatataaatgtaactaaaatgatcaatgctaaatgatgacgaagctaaaccaaccagtacctcgccaaagataataattgttagtaacgaaaaacgttctactaaatgcatcatattaacaggtgataatacaagatatttctgaaatggaataagtcctgtcgctgcaatgaatacgcctaaaaatccagggatgtaatggatactttgtggtagtactaatgatagaaatgataaaaatgaaatcacaaaggctacgctcgcaaaagcttgacatgtacgcttatcgccataatctaaccctgtacgtatatgtaataaatactgtaatccgatacttaaatacataattgccacgcataagaagaatgggaagaatgtcttttcaaagtccggatataggctgttagataggaagaccatgatgaacatattaaacatcataaacgagacgtctttgaatgtaacttgaccaaatcgatttgtaaaaaatgtttgatgagaccacattaaccataagaacaaactcatgacgatgtatttgaaaaataaatcagctgaaatggaaccattttgtgttgttaaaatcacatgtgcaattttttgaatggcatagacgaaaatcaaatcaaagaacaactcatggaatcctgcacgcttttcagctaaatgttttggtgttaatgcattaaccataaaattttaactcctttaagatgtgtaattaatttactaagtatactatttattttttctagtgaataggggcagatttggcgatgaagtggaaggagaggtgactgcaaggtaattgctgaattaacaatcatcagcgatttaatatttgactggagacgtcatggtaagaaaaagttgatgagaaattgatggtgaaaccagctgtgaatagcgatgcaatgatagatagcatttaattagagtcattacgcgaaatgattaatgataatttgtggtaaatcaaagcataattttgtactatagatgaggatgatagagcatatttaagagtgtgaaatgttaacgtgaaaccgtttacgtttccgattgcccaaacaaattacatcattgtataatatgatttgttaaatgcataacaagaatgaaaatgtaacatacgtagcaattggtttcataaattggatgttagtggcgtattggttcattagacgtattagtaataaaattgtatatatcataaggagatgaatatgacatgacgagagtcgtattagcagcagcatacaggacacctattggcgtttttggaggtgcgtttaaagacgtgccagcctatgatttaggtgcgactttaatagaacatattattaaagagacgggtttgaatccaagtgagattgatgaagttatcatcggtaacgtactacaagcaggacaaggacaaaatccagcacgaattgctgctatgaaaggtggcttgccagaaacagtacctgcatttacagtgaataaagtatgtggttctgggttaaagtcgattcaattagcatatcaatctattgtgactggtgaaaatgacatcgtgctagctggcggtatggagaatatgtctcagtcaccaatgcttgtcaacaacagtcgcttcggttttaaaatgggacatcaatcaatggttgatagcatggtatatgatggtttaacagatgtatttaatcaatatcatatgggtattactgctgaaaatttagtagagcaatatggtatttcaagagaagaacaagatacatttgctgtaaactcacaacataaagcagtacgtgcacagcaaaatggtgaatttgatagtgaaatagttccagtatcgattcctcaacgtaaaggtgaaccaatagttgtcactaaggatgaaggtgtacgtgaaaatgtatcagtcgaaaaactaagtcgcttaagaccagctttcaaaaaagacggtacagttacagcaggtaatgcatcaggaattaatgatggtgctgcgatgatgttagtcatgtcagaagacaaagctaaagaattaaatatcgaaccattggcagtgcttgatggctttggaactcatggtgtagatccttctattatgggtattgcaccagttggcgctgttgaaaaggctttgaaacgtagtaaaaaagaattaagcgatattgatgtatttgaattaaatgaagcatttgcagcacaatcattagctgttgatcgtgaattaaaattacctcctgagaaggtgaatgttaaaggtggcgctattgcattaggacaccctattggtgcatctggtgctagagtattagtgacattattgcatcaactgaatgatgaagttgaaactggtttaacatcattgtgtattggtggcggtcaagctatcgctgcagttgtatcaaaatataaataataagaaaacaggttatcacaacagtattaattacatgttggcataacctgtttttatttgtttatggatttattgggtaatattagtcatttgatggtttaattgcaaatgctctaacagggaacccaggtgcatcttttggtttagggctgatagcgtaaatgatggcgccacgagttggtaattgatctaaattagttaataactcgacttggtatttatcctgaccaagaatataacgttcgccaactaaatcgccattttttacaacgtccacagatgcatcggtatcgaatgtttcatgaccaacagcttcaacacggcgttcttcaattaagtacttcaaagcatctaatccccaacccggtgcatgttgttgtccgttcgcatctttgttttcaaacttttcaatattaggccaacgttttgaccaatcggtacgaagtgcaacaaaagtgccaggttcaatagtaccatgctctttttcccatgcttctatatgcgcacgtgttacgatgaaatcattgttgttcgctacttctgttgaaaagtctaatacaattaacggcaataccaattcttttaaatcaatgtcttctaaataacgtttattctcgacaaagtgaattggtgcatcaatgtgagtaccatattgcgttacaatattccaacgttgcacatagaaaccatgatctttaaccgtgaataaagttgaaacttcgcctttttcaaactcactaaaacgtggtatttccggatcaaatgtatgcgttaaatcaacccaagttgcttgttttaaagtatttaattgttgccataaaggatattgtgtcataaaatcacccgtttttagtttattatatgataaatgctgcgattattcttggcgtttagctttaacagcattcacaagcacagtcaatgcatctttaacttcttcttcttttcgcgttttcaaaccacagtcagggtttacccagaataatgaacggtcgatttgttgtagtgaacgattgattgctgtagtaatttcttcttttgttggaatacgtggactatgaatatcatacacacctagaccaatacctaaatcataattaatatcttcaaagtctttaattaaatcaccatggctacgagatgtttcaattgaaataacatcagcatctaagtcatgaatagcatgaatgatttgaccgaattgagaataacacatatgtgtatggatttgagtttcatcacgaactgaagacgttgcaagtttaaatgataaaacagcatctttaagatattgttcgtgatattcagagcgtaatggtaagccttcacgtaatgcaggttcgtcaacttggataactttgattcctgcagcttcaagtgctaatacttcttcgttgattgctaaagcaatttgatcttgaacgactttacgtggtaaatcaacacgttcaaatgaccagtttagaattgttacaggtccagttaacatacctttaactggtttatctgttaagctttgtgcataaactgtttcatcaacagttaaaggcgctgtccattttacatcaccataaatgattggtggttttacggcacgtgaaccatatgattgcacccaaccgaatttagttactaagaaaccttgtaatttttctccgaagaattcaaccatgtcattacgttcaaattcaccgtgaactaatacatctaagccaatttcttcttgaattttaatccatcgagcaatttcattttttaagaatgtttcatatgcttcgtctgtaatgcgtttgttcttccaatctgcacggtattttcgaacttctcggctttgtgggaatgatccaatagttgttgttggtaaatccggtaagttcaaacgtttttgttgttgttcaatacgttgcgcgaatggtgattgtcttgaagtgcgcacgctttcgaaatcataatctaagtttttaaatgattgattttggaaacgctcataacgtgcttttaatttatcatatttaacactatcgttttgattaaataggcgacgcaatgcatctaattcgtctaatttttcagttgcaaagcttaagccttcgccaacacttgtatctaatgtttcatcatctaaagatactggaacatgtaataatgaagatgatggttgaatgacaagttcattagtgtgtgctaacaatttatcgattaagacttttttagcttcaatgtcacttgcccatacattacgaccatcaataattccagcgtataatgtttttgatttatcaaaatctccagcttcaatttgtttaaggttatagccattatcatggacaaagtctaaacctataccaccaacaggtaaagaacttaagaatttaagatgtgcacgttcaaagtatgtttgaatgactaattttttagcaacaccagctttttcgaaatagtcataagcttcacgtgtaatattttcatagctttcactgtcgtctgtaactaagattggctcatcaacttgaatgtactcagcacctgcatcaattaatgattcaaacacttctttataaagtggtaataacgttttaactttttcttcaaaagtttggtgaccgccttttgataatttaacaaaagtaatcggaccaacaatgacagggtgagcgttaacgtttaaagattgggcatatttaaagcgatctaataatacgttgcgactcactttaggctcaacattgtcccattcaggtacgatgtaatgatagttagtgttaaaccattttataagtgcacttgcaacatggtctttattaccgcgagcaatatcaaataataaatcatcatcaatagttcttccttggaaacgttcagggatgatgttgaataataatgacgtatctaaaatatggtcatataaagagaaatcaccaactgggatgctatctaagtgatagtacttttgtaataataaattttctttatgtagatcagttaatgtttgatctaattcttctttagaaatcttttttgcccaataactttcgatggcttttttccattctctttttctacctaatcttgggaatcctaagtttgatgttttaattgttgtcataatattgcctccttgtgagcagtaatagattttgagtatgctgcaagttctaatgaatcttcgacattttgaaacggtgtgataatgtataaaccattaaaatattcatgaacagtatcgattaaatcctttgaaagcttaagacttagttctcgtgttttggctttatcatctttaactgcttcaaattgttgtaaaatttcatctgacatcttgattcctggcacttcattatgcaaaaagagtgcgtttttgtaacttgcgataggcataatgcctatgaaaaatggtttgttcaagtgcttagtggcatggtaaatttcaatgattttctctttgctgtacacgggttgtgttataaaataagacattccgctttctatctttttctctaatcttttgacggcaccatctaattttcgaacattaggattaaaggcgccagcgatgttgaagtgtgtacgtttcttcagcgcatcaccgtcagtgttaataccttgattaaatcttagagcgagttcagttaatcctttagaattaacatcatagacattggttgcacctggtaagtgaccaacttttgaaggatcaccagttatggctaatatttcgttaacgccaatgagcgataatccaagtaaatgggactgcaagccgattaagtttcggtctcgacaagtaatatgtacgagtggttcaatattgtaatattgtttaattaagcttgcagcagcaatgttgctaattctgacagttgccaatgaattatctgcgagtgttaccgcatctacattagctttgtcaagtttagcgatattttcaaaaaatctatccgtgtctaaatgtttcggtgtatccaattcgataataacggttggacgttcttgaaccttagatgttaatgattgtctaactttattttgagatggattgaaaagtgctttctttggtatcggaatcacttttttgtcattaacaggtttaagtgtctgaatagattctttaataaatttgatgtgctctggcgttgtaccacagcaaccaccaattaaacgaacaccttcgcgaattagattttgagcaacttgaccgaaatattgtgcattgtcactatacttaaattcactattttcaatatctaataagctggcatttggataacaagataagaatgcgtgctctggtaattcaatatgtgtgaaagactcttgcatatggtgcgggccatgatgacaattgagtcccacgatgtttgcaccacattgaacgagttgttttaatccttcattgattgcctgaccattaactaagtaatttgtgtttgaagcggttaattgagcaatgattggaatgtcgtatttctttctcgttcgtgaaatgacatttgttagctcttctaggtcgtaatacgtttcgaaaagtagcgcgtcaacgccttcttcaattaaggtgtctatttgaatttcagtatgataaagaatagtttgtaagctgatatcctcttgtttgatacctctaaacccaccaactgtgcctaatatatacgtatctttatttgctgctttttttgcgatgcgtacggcggcttgatgtatagctttaactttatcttcaagaccgaatcgttttaacttttcaaaatttgcaccataagtattggtttgaatgacatcagcaccagcttcgatatatgaacgatggatacgttcaactttatctggatggctaagattatatgcttctggacaggtgtctaatccttcagagtataaaatggttccaatagcgccatcagctactaaaacattatctttcaattgtgtgaggaattgactcattgaatgcctcctttaatgcgtatttgatgtctgcaatgagttcatcaggatcttcgagaccaacacttaatcggaatagaccgaaagtgataccacgttcttgtctcacttcttcaggtagtgcagcgtgagacattgttgctggatgtgaaaggatcgtttcaacaccgcccagactcactgaaacgagtggtaatgtcagtgcatcgacaaattgttgtgctttagactcatcagctaaacgaaagccaataacggcaccgccatttttagcttgttctaaatgagcagtagtgagtcccggataataaacttctgaaatttcatcttgctttattaaaaatgacacgattttttgagcgttttcgacagattgtttaaatctgattggaaaagtttttaaatgtttagcaagtgtccagctatcctgagcagataacatattgcctgtaccattttgtattaaataaagagcgtcactaattgcctcattattagttatgacagcaccagcaattaaatcgctatgtccacttaaaaattttgtagcactatgaatgacaatatcagcgccaagtaataaaggtgattgacctaacggtgtcataaatgtattgtccacagctaccagtagttcatgcttttcggctattttagaaacagctttgatatcagtaattttaaaacagggattcgatggtgtttcgatataaattaattttgtgtttgattgaatggcaccctcgatttgttcgagcttggtagtatctacggttgtaaattcaatattaaatcgattcaaaatttgctcagtgaggcgaaaagtaccgccatatacatcatcgggtaagatgacatgatcaccagatttgaaagtcaaaagtactgctgaaatagcagcaatacctgatgcaaaagcaaaagcgaattttccctgttctaatcgtgctaacttctcttctaaaagttcacggttagggttgccacttcgtgcataatcatatttaacatcgccaccaagacttgtttgatggaatgttgaagaatcatagagtggtgggttagctgaatgatattccacacctctacgccaatcgaatatcacttctgtctcttttgaaagtgtcatacaatctctccaatctgagctttatctaatgcttggatgatatcgcgttcgatgtcttcataattttcaacacctagtgataagcggattaaatactcatcaatgccacgtttatctttttcagcatctggcatatcaacatgtgtttgggtgtaagggaaggtcactaatgtttcagtacctcctaaactttctgcaaaaatgcaaatgtctaaattttctaataattcagcgacgctataggccttgttaagtcttaaactaagcatgccagtttgcccgctatatagtacttcgtcaattgcttgaagtgactgacattttttagcaagttttctagcgtttgattgcgcacgctcaatgcgtaaatgcaaagttttaagtccacgtaacaacaaataactatctattggtgaaagtgttgcgccagtcatgttgtgaaaatcaaaaaactgttgcgcgagtgattcatctttgacagttacgacacctgctagtacatcgttatgtccgccaatatatttcgtggctgaatgtaagactatatcagcaccttctgctagtggtgttgaaagataaggtgttaaaaaagtattgtcgataattgacaataagcctttagctttacaaagttgatagtatggctttacatcaatagcaatcatttgtgggttagatattggttcaatgaataatgcaactgttttatcagtgatttctttttcaacttgttcataatctgtaaaatcaacgtacttaaatttgatattgtattgttgctcgtaaaattcaaataatctaaatgtgccaccatataaatcgaatgaaactaaaatttcatcatgaggtttaaatagattacatattaattgaatggctgacattccacttgatgtagcgaatgatgcaataccatgctcaagtttggcaaaacaggtttcaaatgttgagcgtgtaggatttttagtacgtgtataatcaaatcctgtcgattgtcctagttttggatgtttgtaggcagtagataaatggattggattcgctatagcaccggttgaatcatcagttaatgtgatttgggctaactgtgtatccttcatattaagaccctcctataagaaaaaataaaaagcttccgtccttcgtacccgaatgaatcggataaaaaggacgaaagcttatgtttcgcggtaccacctttatttgttattccatcgctgaaataaccttattcagtacgcattaaaagtaaatatgcttactgaacaattatcacaatttaagtcgttaagtaaggatatagtaatgtgctatcccatacttattaacaaaaaatcgtgcgtaaagaatccagtacgccatttaacatcaatgttaatactgtatcgctataacgggcgaacccgtagacacctcatattggcatcaacactccaaggccattttcaaacacgctttcaaaatcttctctcagctactaaagactctctgtataagcagggtgtgttttactttcctctttattgtgtttacgtttcattaaactgttataagatattaattagcttacagagtaaaaaaagatttgtcaacaattattcagaaaattttgatttaaaagttaatttgtgtgtgaaattgtaattggtatcttgaagttaaaaaatgaattattttttaaataaagtgtggttaatggttgtctgactcatttagaatacataaaatatatttaactgttgttatcaaataaaaagtgatgtgagtgaattgtcaaaaagtgaagatcaacgtattactaaaacaaaagatgaacaaattaagcaaatagatatatcggatatcaaaccgaatccgtatcagccccgaaaaactttcgatgaaaatcatttaaatgatttggcagattcaattaagcaatatggtattttgcaaccaattgtgcttagaaaaacagttcaaggttattacattgtagttggtgaaagaaggtttagagcttcgaaaattgctggtctaaaatacgtatcagcgattatcaaagatttaacagatgaagatatgatggaactggcggtcatcgaaaatttacaacgagaagacttaaatgcgattgaagaagctgaaagttatcaacgtttgataacagatttgaaaattacacaacaagaagtagcgaaacgattgagtaagtcgcgcccgtatatagcgaatatgttgaggttattacatttgccgaaaaagattgctgacatggtaaaagatgggcgactgacaagtgcacatggacgaacgttattggcaattaaagatgaacaacaaatgcttaggttagcgaaacgggttgttaaagaaaagtggagtgtcagatatttagaaaaccatgttaatgaattaaaaaatgtttcgtcaaagtcggaaacagacaaagtagatataactaagcctaaatttataaagcagcaagaacgacagttgcgagaacagtatggtaccaaagtagatatatcaataaaaaaatcggttggtaaaatctcatttgagtttgattcacaagaagattttctaagaataattgaacaattaaatcgtaggtatggtaaatagttacacaattttatataataactctttgtgcaagtgtaaataaattgtaatcagtgaacatttgattctagatatattgagactttcgtaggttggaagtatataaaaatatgaatacaatattgatatatcatatagaagggagtaacgcttatcatgaatcaagtcatgaatattatttcatctctatttgagccattaacaaaaatagaaacatatgaaaacattgcaactaaaatcgctatgattgttatttatattatcgtagccctcatagttattaaaatactgaataaaatgattgaacagggatttaagattcaaaataagagtaaaaagagtaacaaaaagcgatctaaaactttaatatctcttgttcaaaatgtagtgaagtatatcgtttggtttatagttattacgacgattttaagtaaatttggcattagtgttgaaggtgttattgcaagtgctggtgtcgtaggtttagcagtaggttttggtgctcaaaccattgttaaagacgttattactggatttttcattatatttgaaagtcaatttgatgtaggtgattatgttaaaataaacaatggtggtacgactgtggcagagggaacggttaaatcaataggacttcgttcaacacgaatcaatacaatttcaggagaattaacaattttaccaaatagtagtatgggtgaaataacgaactactcaattacaaatggtacagctatcgttaaaattccagtgtctgtcgaagaaaacattgataatgttgataaaaaactaaacaaactatttacttctttacgtagtaaatattacttatttgttagtgatccggttgttattggtattgatgctattgaagatacaagagtaatattgagaatatctgcagaaacaattccaggtgaaggatttgctggagctcgaattattcgcaaagaagtacaaaaaatgtttttacaagaaggtattaaaacacctcaaccaattatgactgcttataatcatagtgaaaacggtgtttagtagtttataatacatggaggtcatatttaatggcgtcaaaatatggaataaatgatatagtagaaatgaaaaaacaacatgcgtgtggaacaaaccgttttaagattattagaatgggtgcagacataagaattaaatgtgaaaattgtcaaagaagtattatgattccacgtcaaacgtttgataaaaaacttaaaaaaatcatcgaatctcatgatgatacacaaagataggagaatgattaatggctttaacagcaggtatcgttggattgccaaacgttggtaaatcaacattatttaatgcaataacaaaagcaggtgctttagcagcgaactatccattcgctacgattgatcctaatgtagggatagtagaagtgccagatgctagattacttaaattagaagaaatggttcaacctaaaaagacattgccgactacatttgaatttacagatatcgctggtattgtgaaaggtgcttcaaagggagaagggttaggtaataaattcttatcacatattagagaagtagatgcgatttgtcaggtcgttcgtgcatttgatgatgataacgtaactcatgttgctggtcgagtagaccctattgatgatattgaagttattaatatggaattagtactagcggacttagaatctgttgagaaacgtttgcctagaattgaaaaattagcacgtcaaaaagataagactgctgaaatggaagtacgtattttaacaactattaaagaagctttagaaaatggtaaacccgctcgtagtattgactttaatgaagaagatcaaaaatgggtgaatcaagcgcaattactgacttctaaaaaaatgctttatatcgctaatgttggtgaagatgaaattggtgatgatgataatgataaagtaaaagcgattcgtgaatatgcagcgcaagaagactctgaagtgattgttattagtgcaaaaattgaagaagaaattgctacattagatgatgaagataaagaaatgttcttagaagatttaggtatcgaagaaccaggattagatcgattaattagaacaacttatgaattattaggattatcaacatattttactgctggtgtgcaagaagtacgtgcttggacatttaaacaaggtatgactgcacctcaatgtgctggtatcattcatactgattttgaacgtggatttatccgtgccgaagtaacaagttatgacgactatgtacaatatggtggcgaaagtggcgctaaagaagcgggcagacaacgattagaaggtaaagaatatattatgcaagatggcgatatcgttcatttcagatttaatgtataaacgatagagtgaagttaattaaatagtatatatggagaagaggcggaatcaattgttcgcctcttttaattatgcgtataatttattaaaagaatggaataattttactcgcgttaataatatcttgagtgctgaaaaattgtttgccttcgccagtataagcaggctctaaaacaagattagcctttgcacaataaagccattcaggatgaatgccactattaagtatctcttggaattcttgaaaatctttagaccaatcaatatttaaattcattccttaacacctcacaactattatagaacatgcgttcgcttttgtgaagtgtatttttaaaaatatcatagaaaatttcaaatgaattaatgtcaaaaatgatatgaagagtagtttgaattattattgtaaaaagtaatggcgcatgatataattctttattgtgagtaatgaaaattattccttgcttatctgttttaagattgataagccgtatagaccacaaggaggtgcaaatataaaatgagaacatatgaagttatgtacatcgtacgcccaaacattgaggaagatgctaaaaaagcgttagttgaacgtttcaacggcatcttagctactgaaggtgcagaagttttagaagcaaaagactggggtaaacgtcgcctagcttatgaaatcaatgatttcaaagatggcttctacaacatcgtacgtgttaaatctgataacaacaaagctactgacgaattccaacgtctagctaaaatcagtgacgatatcattcgttacatggttattcgtgaagacgaagacaagtaataattagagggggcgtttaaatgctaaatagagttgtattagtaggtcgtttaacgaaagatccggaatacagaaccactccttcaggtgtgagtgtagcgacattcactcttgcagtaaatcgtacgttcacgaatgctcaaggggagcgcgaagcagattttattaactgtgttgtttttagaagacaagcagataatgtaaataactatttatctaaaggtagtttagctggtgtagatggtcgcttacaatcccgtaattatgaaaatcaagaaggtcgtcgtgtgtttgttactgaagttgtgtgtgatagcgttcaattccttgaacctaaaaatgcgcaacaaaatggtggccaacgtcaacaaaatgaattccaagattacggtcaaggattcggtggtcaacaatcaggacaaaacaattcgtacaataattcatcaaacacgaaacaatctgataatccatttgcaaatgcaaacggaccgattgatataagtgatgatgacttaccattctaataaaaattaacgaaattaaagcgaaaaaattatcaaaggaggcacacaatcatggcaggtggaccaagaagaggcggacgtcgtcgtaaaaaagtatgctatttcacagcaaatggtattacacatatcgactacaaagacactgaattattaaaacgttttatctcagaacgcggtaaaattttaccacgtcgtgtaactggtacttcagctaaatatcaacgtatgttgactacagctatcaaacgttctcgtcatatggcattattaccatatgttaaagaagaacaataatatataatttattgtcaaaccccgtaggcataggcttacggggctttttgtgttttggggtatagaaaaagggcaaaaaaggatgatgtgaatgttttgtgttcggaatttgcacaaagatatgtttatattgcaaaaataatatgaatttagatgcataaaaaaaagaggcaaccgtcagtaacagttaacctcaagtgcattccgcagatatgcaccgctatttatgtataatattaatatgtttttagataaaaatcaaggttattgataaagttctttaaacttcttaatttaggtcttgctcgaacacctataattttatcataagtcgactcgcttatctttgatcgtaaaaaatcaaggttttgttcgaattgctttataattctttggagttctgttttagaataagagagaccagaacaaattaaaattaataaaatgagataatcaattattctgtcgaaatctaaattgtgtatatccatttttactgctaaatattcttttaatctattacttgtctctccagttttaaatctacagtcataaagtacaccattgtgagctatagcatttcttaagcctttcatacaatcaatgatgtcacctagtatatctttactttgatcaaatgctggggagtataattttagttgcttttgagcttctatattcaaattttgggacatgcaacgagtgaaaaataccagatttcccaaagtgaataattcaaatacggcatatagtggcacggttctatcttgatgtatgtaatgataaatgtaaggtttcgaattacaatgttcatggatcatgtcgtaaatatctcttcttagtctagtagtattttttaaatgttttttatattttgagctaccgagactataacttttataatatgttaatgatttttgaaataaactatctaaatcaaagccagagtttacacaaactatttctagcaatctatttttaatagccgtttcacagaacataacgtgtttatagaaaaggcttttaatttctgtatcaaaactgtataaagcttgtaattcgctaaatttttcaaaattaagttcttcctctttgtttaaaaagaaattataccctttgaatccatgaaaatagccgatgtttcgtaactggattttttccgtgctaccatttatttggatacctttattgtctcttatatgtctcattaaaccatcagtagttttaggtgtttttctgttcatagtttttaactccccaatcattcaaatttattcatcatatctttcgccatctgattagtaacatgtgtgtatatctctagattttttttataatctgaatgacctacatgctcttgcattgcttttaagttaattcctaattgagcaagtgtagatatatgcgaatgatgtaatgtatgcgtcgttacaggtttcttaatagaactaatatcagcgccccctttaataatgtggctaattttgttcgagtcgatagggctaccagccgtatttgtgaatatgtactctctatcaataaacttatcattccaagcataagtgttcttaataagtcgatgctttgggtagtgagccctatggccttatagctattacttctttcagttgtctcctttactccgaatgctcccgtcttttttcagttatccaattaattgtaccatcgatatctagcgttttatcttcatagtttatattttctctctttattgcaagtagctcaccgatacgcatgtcattagcaatttgaaactgtaccatagcttttaccattttataattacgttttgtcgttggatatttttatacttaattacatagtcgaaacaatccagtaactccttatcttcattatcttcattatcttctaaagtgttattacgtttagctagtaacgcatcactatagggatatctattttatctattacacatataactttgaattgcttactattttaaattaacaaattctattctcttagatttagtccaattatgtgtagacgatttatagttattaaattcagagtggtagcaaattaaagttaatcaagagttaagatgaatttaattcatgaacacgtctattatttttataattgtagcaaataaagctttacatcaaggaggtaattaaatatgttcaaaaaaaatgactcgaaaaattcaatcgtattaaaatctattctatcgctaggtatcatctatgggggaacatttggaatatatccaaaagcagacgcgtcaacacaaaattcctcaagtgtacaagataaacaattacaaaaagttgaagaagtaccaaataattcagaaaaagctttggttaaaaaactttacgatagatacagcaaggatacaataaatggaaaatctaataaatctaggaattgggtttattcagagagacctttaaatgaaaaccaagttcgtatacatttagaaggaacatacagagttgctgatagagtgtatacacctaagaggaacattactcttaataaagaagttgtcactttaaaagaattggatcatatcataagatttgctcatatttcttatggcttatatatgggagaacatttgcctaaaggtaacattgtcataaatacaaagaatggtggtaaatatacattagagtcgcataaagagctacaaaaagatagggaaaatgtaaaaattaatactgatgatataaaaaatgtaactttcgaacttgtgaaaagtgttaatgacattgaacaagtttgaaattaagttaaattagtatatatagtgttttatcgctaatactttgaaagttaggtatctaaaggtgcctagctttctttgttatgattagcaccatcatatagaaaattctttaatgacgtttatgccgaaatctacaaaaataatttctcttttatggttaatcaatatgtttttacattcgacaaccttaaaattaacttctttcaattccataataaagtctctataaaataacttattttaaaaacgattcgtatctttcagattcaaataccatcattttctcctaatacttacactttaattacaattatgtaagttgttttcagaggcatcctattttatattttgtcagaggtgatcttttgaaaacgattttaaaaacaataacatatcttgcacttactatcattggcgcttatgctgctttattcattttaaaaacaatagactctcatggtataacagatcaatttaacccattagtaaaggaagatgattcttatgttaaaacgacagaggtgtctactagaatggatgatcaactccgaagttatactcaaagtgcttttaataaagaagggaaagagacgcaattaatgtatactgctacatttgatgttaaaccgcatagatacttgaaaattacacataaaggtcatcatgtagaaacttttgaagaagttgaaaaggaagaagtacctaaaaaagcattagacaaactgagtcgataatagcatgcttatattacatggttcaattataaaatgagtacgaacgaaagtaacacatgatgattaatttaaaaatatttgtaataattatgaataaaattaaaaacaaggggtaatacaatctatatagcatataagcttttgttatgagtttcaaaaataggaagagagagtgatattatgaaattaaaatcattagcagtgttatcaatgtcagcggtggtgcttactgcatgtggcaatgatactccaaaagatgaaacaaaatcaacagagtcaaatactaatcaagacactaatacaacaaaagatgttattgctttaaaagatgttaaaacaagcccagaagatgctgtgaaaaaagctgaagaaacttacaaaggccaaaagttgaaaggaatttcatttgaaaattctaatggtgaatgggcttataaagtgacgcaacaaaaatctggtgaagagtcagaagtacttgttgctgataaaaataaaaaagtgattaataaaaagactgaaaaagaagatacagtgaatgaaaatgataactttaaatatagcgatgctatagattacaaaaaagccattaaagaaggacaaaaagaatttgatggtgatattaaagaatggtcacttgaaaaagatgatggcaaacttgtttacaatatcgatttgaaaaaaggtaataaaaaacaagaagttactgttgatgctaagaacggtaaagtattaaagagtgagcaagatcactaaaaagattcgttgcattaacgcttgtaaaatgtcttaatttatattaattaataaaataccctcacaacgtaatgtaatatatccagtatagatttgaaaggatatatgccaaacgtgttgtgagggtttatttgcatctatttatccatgcgaatatcgacttcttctaaatgtttctgatattctttaaccttactttctaaaaacatttcatatggtgcatcaaagaagtcagctaaatgcatggcatctttaaatttaggttcatggtgatgattctcccattcccaaatttgatgtgcttcatatttagtaccatatttctcatttaattgctgtgctaattcgtcaatttctaaattatgtttagttcgtaagttatataaaatatgcatattcattgttcattaacctcgcttcttgatttaaaattcaaagatgctctaataatatgtgtatattctagtcctataacataaaataatcaagctatgaattcggcagaaaaaataatgtaaatgtatatgatattaccggtacagagactttaaataacgatagctacattgaataaaattgatattcaattactacttttaaaaatatttggataaaaataatttgaatttgttttagaattgtaaataaggggtactacttagaataacgcaaaataaatagaaaaaggagactgaaaattatgtttggatttattggaatgttaattgtcggtggcttaattggatgggctgctggtgctattatgggtaaagatatcccaggtggtattttaggtaatattatcgcgggtattattggatcatgggtaggtggcaaactattcggacaatggggtcctgaattaggaagtatttacatcttaccagctttaattggttcaattatctttattgcaattgtaacgttaattttaagagctgttcgtaaaaaataaaatattcaacttaggttgaattgaaataaagatggcattcagttgtcatcttttttatttgcgtgaaaatggtcaatatgtattataatatttgaaaatgtaggtaagataggattaaaaagtaataaattaacatgaggagaggttggaaataaaaaagcgagtatttgacaaataaaaaaaggatgacgttgggttgcgccatccaggagtattatgttcatgaatataaaagactgtgtagtcatttaagaactacacccatatagtaacacatcacttgattaaagacaatactatttttagagtcattaatttaaaatatgaattaattcttttttagaaaagactattaagattgatgccgattaagtggtcaaagtgttatggtagatatgaaatacataaggtaaggagtaatagcatgacgatttatttagttagacatggtgaatcacaatcgaattatgataataaacattttagatcttatttttgtggacaattagatgtgccgttaacggatactggcacaaaaagtgcagacgatttatgtgattattttaaagagaaacagattaaacatgtatatgtttcagacttattaagaacacagcaaacgtttgaacatatttttccatatgacattgcatcaacgactacgcctctattaagagaacgttcacttggcgtatttgagggtgaatataaagatgaaatcagtgcgaatccgaaatatgaaaaatatttcaatgatccaaactttaaagactttcgtcatagtttttcacaaaaagcgcctgaaggagaaagttatgaagatgtatatcaacgcgtagaacattttatgaatcatgttgtcaatgaagatacacaaaaagatgatatcgtcattgttgcacatcaagttgtcattcgttgtttaatggtttattttaataacgtttcacgggaagaagctgtggatttaaaagttgaaaattgcaaaccatatatcattgaatagaagtatagaggttctgaaaagctgtgttttatagtggccttcagaacctttttggcatttggaatttaatgggaatcattcttatcaacagacttaccaccaatagataatgtgataattgtgcttgcgaacaaaataattgaagttataaatgacgctaatgtaaaaggtgtaaattgtgtgaacgataatatcaatgataaaaagaaccaagagatagccccaagaaattgtaaaatagcagaagaaattctaaaactcgtataatcatatatagctaaaacaattgaaggtaatgcgactaataccattataatgatgttgagggtgaataaatatggctgttcaaaagttactgtgtttggacctgttggatgcatggctgctaaaaataagcaaacaatcgttgataaaattgataagataataaaagtaattcgaactttcatcatgaccatcctttgtttatagagtcaatataagtatgaaatatgttagatatatagtcaaatgcgtcaactaatgggaattttggcatagatagagaatttaagaccaataaaaaagcatcaaacagtaatatgctgcttgatgcccaaatgatgactttagctaaattgattagtcacttttaaagataaagaattgtcatgaattaaagctcatgtaatgatgtgttacatgtcgcaatgatggctttcagttatttatcgataacatcactcttgatacctttagattttaagaaatctttaattttatcttgttgctttttattaacatcaccggcatattttgttggcacgtcgactacattgattttattttgcggttgatagctaagcttttcaatatcttcatcaacattggcgattgtactatttaaagctttgaagtaattcatcattaattcaacgggtttcttatattctttaggaatattgttttcagtgacaaatttcttgaaatgcaaatcgtttttaacagctaagttagataagtggctaagtgtttctgcttgtttttcagtcacttttgtttgactgtcaatttgtttatctagtttatgttgcataatatatttgttatcaagtatatcgctatttacagacaaatacttttctatagcttgcttcatctctgcatcactaatatcactatttttcttatctgagttaaagatatcttttgtttctaattttttagcgcttttaggtgcatggatgccagtacttgtatgatgatcttcgttatcagattgatcggacgcgcaacctgtaagaattaatgtcgatgctaaaaatgtacttagtagtaatctctttttcataatgtaatataactccttagtttatctttaattgaaaaaatatgtattcatgtttaatagagtaacattgaattagtttggaatttcacgatgaccttgcaatgaccatagacgtaaatgattacgtgcatgagttactttttctatcaataatgcgtcgttttgaacattgttaaggatagcattatctataaataactgcataattggttgtatcaatttagatgtaggtatcgtacgtaaaagcataatgatttcgttcacatacttttccttctcaatatcatttttcatattgatttgtttgcgagaggtacatactttaagcattatcgcacatctcgttgtatatattaagtttatcataacatgattttatgccaggataaaaaataacagcatcttaacaaatgtaagatactgtcagtaaaactgtgaaaactttagtttctgataatatagtcaaaggcatttaatgctgcatttgcaccagcgcccattgaaataataatttgtttgttcttctgatctgttacatcgccagcagcaaatattccaggtacgttagtattattgttacgatcaataacaatttcaccacgttcgtttaattcaacagcatcgtttaaccatgatgtgtttggaagtaaaccaatttgaacaaagataccatctaagttaagtagatgttcttcgccggtgctcatgtcttcgtaacgtatacctgtaacatggtcttctccgacaacttcagtagttttggcatttgttttgatatcaacatttgataaagaacgtaaacgatcttgtaacacgttgtctgcttttaattcgctagcgaattcgaataatgtaacatgattaacgataccagcaaggtcaattgctgcttcaaccccagagttaccgccaccgataactgctacgtctttattttcgaatagaggtccgtcacagtgagggcagaatgcaacacctttattaatcaattgctcttcacctggaatgtttagcttacgccaacctgcaccagtagcaataatgactgttttactttctaagacagcaccgttttctaacgtaactttaattgcttcgtcagtcttttcgatatctgtagcacgtatacctgtcattgcatcaatgtcatattgatcaatgtgcgctgctaagttagaagaaaattcagaaccagttgtttctttaacagtaatgaagttctcaataccagcagtatcattaacttggccaccgatacgatcagcaactataccagtacgtaaacctttacgtgctgtgtaaatcgctgcactaccactagcaggaccaccaccaacgattaagacatcataaggttctttattttcaaactcagatgcatctgccgtactgcctagtttcgaaagaatatcttggattgtcatacgaccattgccaaattcttcgccatttaaaaagacagcagggactgccatgatgttttcagattcttcacggaacactgcaccatcaatcatagaatgcgtgatgttagggttgatcacactcattaagttaagtgcttgaacgacatcaggacatttttgacacgttaaactaatgaatgtttcaaaatggaatgaaccttctaattttttaatttggtcaatgattgactgtttttctttaggtgcacgaccactaacctgtaaaattgctaaaacaagtgagttaaactcgtgacctaatggaatacctgcaaatgttacacctgtttcttcgccaggacgattgactgagaaacttggtgtacgttttaaagatttttcagaaagagatagtctaggtgacatatcagtaatttctgtcaacaaatctttaagttctttggatttatcatctgaaccaaggctggcaacgaattcaacgttgccctccattagttctaatagttgtttaagttgttgttttaaatcagcattaagcatggttgtaatgcctccttagattttacctactaaatctaaaccaggttgcaatgttttagcgccttcttcccatttagctgggcatacttcgccagggtttttacgaacatattgagctgctttgattttgtgagctaatgtactagcgtcacggccaattccgtcagcgttaatttcagatgcttgtacaacaccgtctgggtcgataatgaatgtaccacgttgagctaaaccagtagcttcatctaatacatcaaaattacgagtgattgtttgtgatgggtcaccaatcatagtgtaagtgattttgctaattgcatctgaatggtcatgccatgctttgtgtacgaagtgagtatcagttgatactgagaatacatttacgcctaatttttgtaattcttcatattggttttgtaagtcttctaattcagttggacaaacgaatgagaagtcagcaggatagaagcatactacgctccaagaaccttttaaatcttcttgtgtaacttctttaaattgatctttttttggatcgaaagcttgcgctgtaaatggtaagatttctttgttaattaatgacataaatatcttcctcctaagaatttaagtatgaattagaactatcaattgattgcgcttaattataataattctaatctcttagttagcattattacattttgatccagaatagtcaactggataactttgtaaagtgaatgattacttttaaaataaagaaagataatataaagtgctttgataatggattttgtagttgatgatttaaaaggttgtgtctatatttaatatcttgattttaatgtaaaaaatgtaaaaaaagaagatttgtattctcaactaagtcaaccttattgataatggtgtgagaatatttgttcgagatggatgaaggtaatgagtgagaaactggatttttaaagtatgagacaatattttaaaaagttcaattattaacttataagcaaataattgctataaaaaagtttggacgtgtacaattgcaatatgaagattttaaattaattgtaaagtatcgaggagtgggtaacgtgtcagaacatgtatataatcttgtgaaaaagcatcattctgttagaaaatttaagaataaacctttaagtgaagacgttgttaagaaattggtagaagctggacaaagcgcttcgacgtcaagtttcctgcaagcatactcaattattggtatcgacgatgagaagattaaagaaaatttacgagaagtttctggacaaccttatgttgtagaaaatggctatttattcgtctttgttattgattattatcgtcatcatttagttgatcaacatgctgaaactgatatggaaaatgcatatggttcaacggaaggtttgctagtaggtgcaatcgatgcagcattagttgccgaaaatattgcggtaactgctgaagatatggggtatggcattgtctttttaggatcattaagaaatgatgttgaacgcgttcgagaaattttagacttacctgactatgtcttcccggtatttggtatggcagtaggggaacccgcagatgacgaaaatggtgcagccaagccacgcttaccatttgaccatgtcttccatcataataagtatcatgctgataaggaaacacagtatgcacaaatggcagattacgaccagacaatcagcgagtactatgatcaacgtacaaacgggaatcgcaaagaaacatggtcgcagcaaattgagatgttcctaggaaacaaagcaagattagatatgttagaacaattgcaaaaatcaggcttaatacagcgatagcaagataccaaaataacccgcccccctctagcttaaaatgataagtatagctagagggggcgggtatttcttgcaatgaattagtgtgaagttaatgcagcattatcatttgaatcgaaagtatctttatcccaatgtttagttaacttggcggtacctgtaccagctagcattgaatcgttcacgtttaatgctgttctacccatgtcaatcaatggttcaacggagatgagcacgccggctaaagcgactggcaagtttaacgttgacaacaccaatatggatgcaaatgtagccccgccaccgacgccagcaacgccgaatgaactaataatcacgacagcgattaacgttacaataaattgtaaatcaatttctacattagcgacgggtgcgaccataattgcaagcatggcagggtaaatgcctgcacaaccattttgtccaatcgacaatccaaatgtcgcagcgaaattggcaataccttctggcacgcctagacgtcttgtttgtgtttgtacattcaatggtaaggcacccgcgcttgagcgtgatgtgaatgcaaagattaatacttccaaagtctttttaacatagcgaattgggctaatacctaacaggcttaaaataattaagtgaatgatatacatcgtaattaatgcagcgtacgatgcgattaagaattttcctaaagtccaaatggcgccaaagtcacttgtcgataatgtgttggccataattgctaatacaccgtatggcgttaaacgtaagacgaacgtcacaatcgccattactagtgaatagatagcgtcaatcgcacgcttaagcaattcaccatgatcaggttgtttgcgtgctacgcgtaaataagcaaatcctataaacgaagcaaatatcacgacagcaatcgtggaagttgcacgttgtccagtgaaatctaagaatggatttttaggcaataattccaaaatttgttgtggtaacgtatgtgctgttaaatctttcgcttgtttagcaatttcgcttccacgtgcttgttcagcgttaccaaggttaattgttgatgcatctaaaccaaacaccaaggcatacacaacaccaacaatcgcagcaatggtgacagtgccaattaaaaagataaaaatgagactaccaattttagcaaacttttctccgatttgaattttagtgaatgcagctacaatagaaatgaaaattaaaggcatcacaatcatttgcaacaatgcaacgtaaccttgtccgacaatgttgaaccagtcacttgttgatgtaataacattcgaatgtgtgccataaataagatgcaataacacaccgaatactataccaatccctaaagctgtaaacacacgtttcgcaaaagatatatgtttgcgagccatcatgtgcaatattacgatgaaaatcaccaatacaataatattaatcagtgtaagaaaagcattcatgaacgtcactcctcaaatttttgaatataattccgactagtatgctaagaataatattaattttaaaatatttcaagagggcatttgcaattaaatgtaaacatgatgaaattcgaccgttggcataaggggatttgtaaacaaatcgttttgaattcagtagtgataggtggaaagggtaaatagtgtgatgagctagtcgattaaagttaatatttgaaaatgaagcagggcattaaatgcaataaattaaataagttgtcattaaagcattaataatagaaatgattttaacaggaaaaaagtgatgaatatttggaaaagatatatatcgtgcactgtcatgagagataagatatgagaaaacaaatttatccttgaatcgagatgtggctatggcggtttgataaaaattgctaacctcatatttattgaatgaaaagataataaatgatcaaccttgaaaagacgcttcgaacaaacacgttgtaaaaaattctgtcgaatcaaaattagcatcttttgagtgttcgtgtgtgcaggtggtagttcaaaagctaccgtaaacaaatatttttgtttgagcaaaaaggcgtttgtagtaaatgtgaatatgagtgtgcacttgtgcgattcgtcagttactaacacagccaaacatttaaattgaatggacttattaagatgaatctatttagaagtacacagaagccatcccatttaaaagtaacatactataaaaatttattcaaaattcaatattaatcataatgaataattaaaaaacctgaaacaaattagtttgatatgctctcttcaaagtagatattgaatggagtatatcagcttgtttcaggttttatgaattgagtattaaatttgaaagtaaattacagttctataggtttataaaaaatcagtttttaaatcaaagctatatattattgagtattaaatttgtgttcaaatcacaagtttacaggttgaataaacgtgcgaagaaaccttttttctcttcttgaggtttaggttctgccatttcagactgtgaagctgtgctgtcattttctgctttcgcttccaatgaatcgttagaagtagcttgtttagaagcttctgcatgggcttctgctacttgttgttcagcatcatgttgcgcttctgcatctactgtagcttctttatttgaaggctcagctgcattgtcatttttagactgctcaacgctggctttttcaattgcttcagttgcagaaatttgatcctctttatctactttagtagcagtgccatcgcctgcattttcagcattagtatccgttgcagcatttgctgttgactctttcgaatctttactgtcagctttatcttcagtaacagcattattttcaactttatttgttgattcagccaatactttagcttgagatgcttgtgcttcttggatagcctcttgtgatgtttggatggcttttaaggattcgctatttgaatcgattttagatgtaagttgattttgaagttcttttaattcttgttgttgctgatgtacttgattcatcatttgaccaagtaggtgacgttcttcgcgcattttctggatttctaggcgtaaatcttctactagttgagcgacattttgattagtaggtaagtttttgtcatcgtttttgacaatgacttgcaggaagtctttttctttttctaattcatcaaacgctagatcataactatttgtttgttttactttgtcggcaatgtctttgaaaagctcgatatcttcttctttgaaatcagttgcttcacgaccacgatattcagtcttgcttagttggtaaccacgttcttctaaatgttgaacaattttacggacttgcttctcacttagttctacgcgttgtgcaaattctttagttaacatactttaaagtcctttctgcatatactttatgtatactgacgtttgtctacgggcagtgaaacgtcagtcttgcttcatacatagtttaaacgttattgttagtgatttcaagtttgtttaaaatggtttacgtaaatccatttcttctaataaagcataaataatttcacgtgcgataccattggcaaatacatacttcaaaatataatttgatttaacacttgtaccgtagatatcctttgtcagtttaatatttttctttaaaaataagtccacttttttagtgtgaccatcattagttggatgaatgtaatcaatttcagtttgtctttcaaattgatgttcgtataaaaactgtctacggtgttcaataatgagtccattatcttgtgttaaatctgcaggttctttagggacttccatcattaaaaagttaatacttctagaatgaacaaggtttgataataagtttagttcatgttcaatctgatgtaatgtttgcgtcattaactcatcatggttgggtaggtcttttgcgaataaataaattaaaaatgctgaattggttgtggcttcataatgtgcagttgctagactgacaacaacatcgttttctaagcctacgataaagacataatcgttttcggttttgttgttttctaatgagcgtttgatgatacgtttatcttcagttaaagataaatttaacttagtatcgtaaagtttaagtgcttcgttgtaatgtggatctttgacagattgaatggttttaaattccataagaacacctccccaatttaaataatattatagcataatcgcctgctgtaaaagactgttcataaacttttaaatggtataaaaaactgtactatcttaaattagacagtacagtaatctcattttgaattcagtgtgataactaagctttgggacctttagatgcttcagcaaaatgtgtaatatcaatctcttcataagctgaattattttcatgcacttcttgatgtgatgatttgtcacgaaccgctacaactaacattttatcgtctaaaataagttgtttatatttttctaattcatcaggcgctaagttgtagcgtgataaaactgcatgttcaccatcttctcctgttaacagtttagtcattctatcactaaatgttccacttgttgagataagggagatttcagagtcgtgtaagtcatttaggtgtaatttacttttactaataattgttagctctgattctaaataaccttcagatttcttttgattgattacgttgtataattcgccagtgtcatttactacagtaatatctgccatagttgtcgcccctttaaaaatttgtttatttaatcttttacccttcttattttaaagtaaaacccttacattattaagttataagtcttcattcgcattaaacgtctctgtacatttataaaacgattaaaagattacctaagcagttattgaaaaaatgccgaaaatttgctattatcgttaaataatttacataaactcatataatctaaagaatatggctttagaagtttctaccatgttgccttgaacgacatgactatgagtaacaacacaatactaggagtagcttcagccattaaattgtaaccataatgggtgatttatatcattttatatgatgggcacagtttatttgatgaaacttcttttacattgattgcatgacaaattcgttatgcatgttcgttcactcataaaccctgaaactattatttagtttggggatttttttgtatctagcaccaatttaagagcaaaatgtttcacacaaatctgaggaggttttaagagtggagttactaggacaaaaagtaaaggaagacggcgttgtcattgatgagaagattttaaaagtcgatggatttttaaatcatcaaattgatgcaaagttaatgaatgaagttggtcgcactttttacgagcaatttaaagataaagggattactaaaatcttaaccattgaagcttccggtatcgcacctgcaatcatggctgcactgcattttgatgtgccatgtttatttgcgaaaaaagcaaaacctagcactttgacggatggttattatgaaacatctattcattcatttactaaagataaaacaagtacggtcattgtttcaaaagagtttttatcagaagaagatactgtacttattatcgatgactttttagcaaatggtgatgcttcattaggattatacgatatcgcacagcaagcgaatgctaagacagctggtattggtattgttgttgaaaagagtttccaaaatgggcatcaacgtttagaagaagcaggtttaacagtttcgtctctctgcaaggttgcttcactagaaggaaataaagtgacattggtgggagaagaataatgaaaaatttaatcctaagtgttcaacatcttttagctatgtacgcaggtgccatcttagttccaatcattgttggtacaagtttgaagtttacacctgaacaaatcgcttacttagttacagtagatatatttatgtgtggggttgccacatttttacaagccaataaagtaacaggaacaggattaccaatcgttcttggatgtacattcacggctgttgcgcccatgattttaattggtcaaacgaaaggaatagatgtactttatggttcgctatttttatcagggatattagttattatcatcgcgcctttcttttcacatcttgtaaaattcttcccaccagtagtaacgggtagtgttgttactatcattggtatcaatttaatgccagtagcaatgaattacttagctggaggtcaaggtgcaaaggactatggagatgttaagaacattttgttaggtttaatgacattaatcattattcttgttttacaaagattcacaactggatttattaagagtattgccatattaattggactcgttttaggaacgataggtgctggcttacttgggatggtcgatattaatcaagtcaatcatgccggttggttaggcatcccagtgccgtttagattctctggatttagctttgatgtgacatcgacgttagtgttctttattgtagctatcgttagtttaattgagtcgacaggtgtctatcatgcgttaagtgaaattaccggtaagaagttagaaagaaaagattttcgtaaaggttatactgcggaaggtctagcgatagtgttaggttctatattcaattcatttccgtatacagcctattcgcaaaatgtaggacttgtttctttatccggcgctaagaaaaataatgttatatacggcatggtcgtgttattacttatatgtggttgtatacctaagcttggtgcattagcaaatatcataccgctacctgtgttaggtggtgcgatgatagctatgtttggcatggtaatggcatatggtgttagtatattaggacatatcgattttaaaaatcaaaacaatttattaattatcgctgtatcagtaggattaggtactggtataagcgctgtaccacaagcatttaaaggtttaggtgaacaatttgcatggttgactcaaaacggaattgttttaggcgcaatctctgcaattattcttaatttcttttttaatggaataaagtataaacaaacggaagaaaatgtgaaataatataactaattaatttgaaaaatggaggctgtttttaatgtgggaaagtaaatttgcaaaagaatcattaacgtttgatgatgtgttattaattccagcacaatctgatattttaccgaaagacgttgatttaagcgtacaattatcagacaaagttaaattaaatattccagttatttctgctggtatggatactgtaactgaatctaaaatggcgattgctatggctcgtcaaggtggtttaggtgttattcataaaaatatgggcgttgaagaacaagcggacgaagttcaaaaagtaaaacgctcagaaaatggtgtcatttcaaacccatttttcttaacgccagaagaaagcgtttatgaagcagaagcattaatgggtaaataccgtatttcaggtgtaccaattgttgataataaagaagatcgcaacttagtaggtattttaacaaaccgtgacttacgttttattgaagacttctcgattaaaattgtagatgtaatgacgcaagaaaatttaattacagctccagtgaatacaacacttgaagaagcagaaaaaattctccaaaaacataagattgaaaagttaccattagttaaagacggacgtctagaaggtcttattactattaaagatattgaaaaagtaatcgaattccctaatgcagcaaaagatgaacatggtcgtctacttgtagccgcagcaatcggtatttcaaaagacactgatattcgtgctcaaaaattagtcgaagcaggtgtggatgtcttagttatcgatacagcacatggtcactctaaaggcgttatcgatcaagtgaaacatattaagaagacttacccagaaatcacattagtagctggtaacgtagcaactgcagaagcaacaaaagatttatttgaagcgggtgcagatattgttaaagttggtattggcccaggttcaatttgtacgacgcgtgttgtagcaggtgttggtgtaccacaaattacagcaatttatgattgtgcaactgaagcacgcaaacatggtaaagctatcattgctgatggcggtattaaattctcaggagatatcattaaagcattagctgctggtggacatgcggttatgttaggtagcttattagcaggtactgaagaaagtccaggcgcaacagaaattttccaaggtagacaatataaagtataccgtggtatgggctctttaggtgcgatggaaaaaggttcaaacgaccgttacttccaagaggacaaagcgcctaagaaatttgttcctgaaggtatcgaaggacgtacggcatataaaggtgctttacaagatacaatttaccaattaatgggcggagtgcgtgctggtatgggttatactggttcacacgatttaagagaattacgcgaagaagcacaattcacacgtatgggtcctgctggtttagcagaaagccacccacataatattcaaattacgaaagaatcaccgaactactcattctaattaagataaaggagaacgacaaatatggaaatggcaaaagaacaagagttaatccttgtcttagactttggtagccaatacaaccaattaattacacgccgaattcgtgaaatgggcgtttatagtgaattacacgatcatgaaatttcaattgaagaaattaagaaaatgaatccaaaaggtattatcttatcaggtggtccaaattcagtttatgaagaaggttcatttacaattgatccggaaatatataatttaggaattccagtacttggtatttgttacggcatgcaattaactactaaattattaggtggtaaagttgaacgtgccaatgaacgtgaatacggtaaagcaatcattaatgcgaagtcagatgagttattcgctggcttaccagcagaacaaactgtttggatgagtcattctgataaagttattgaaattccagaaggctttgaagttatcgctgatagcccaagtacagactatgcagcaatcgaagataagaaacgtcgcatttatggtgttcaattccatccagaagtacgtcatacagaatatggtaatgatttattaaataattttgtccgtcgtgtttgtgattgtaaaggtcaatggacaatggaaaactttatcgaaatcgaaattgaaaagattcgtcaacgcgtaggagaccgtcgtgtattatgtgcgatgagtggcggcgtagattcatctgttgtagctgtactattgcataaagcaattggggatcaactaacatgtatctttgtagaccatggcttacttcgtaaaggtgaaggcgacatggttatggaacaattcggtgaagggttcaacatgaatattattcgtgttaatgcgaaagatcgttttatgaataaattaaaaggtgtttcagatcctgaacaaaaacgtaaaatcattggtaatgaatttgtatatgtatttgatgatgaagcatcaaaacttaaaggtgtagacttccttgcgcaaggaacactatatacagacgtcatcgaatcaggtactaagacagcacaaacaatcaaatcacaccacaatgttggtggattaccagaagacatggaattcgaattaatcgaaccaatcaatacattgtttaaagatgaagtacgtaaattaggtattgaattaggtattccagaacatttagtgtggagacaaccattcccaggacctggtcttggtattcgtgtacttggagaaattactgaagataaactagaaatcgttagagaatcagacgcgattttacgccaagtgattagagaagaaggtcttgaaagagaaatttggcaatacttcacagtgttaccaaacattcaatcagtaggtgttatgggagactaccgtacgtatgatcacacagtaggtatccgtgcagtaacatctatcgacggtatgacaagtgattttgcacgcatcgattgggaagtcctacaaaagatttctagtcgtatcgtaaacgaagtagatcacgtcaaccgcgtagtctatgacattacatcaaaaccaccaagcacaatcgagtgggaataattatatttaataatataaccctttaacattaattgttagagggttatttttagctcgaaatttaaaggaaaggttaggctggaattaccgtaattatgcggtttccagccttttttggtgtacttggtatgggcaacatcatgtgatgaaatgatgggagtcatctctttcttatattttgagacggagatgatgagaagttagacaaaaatgtagaagaagtatttaacgacaatcctagtcatacaatgattgtagatgatatccgttagaggagtgagagcaaatttatttgttactaagagacaagagttttaaataaatatcttttgtactacataaaagaaagtggtcgttatcatagaatatttggcgataaggtaaatctgattatgttagaacctatatttattgatgatttagtgaggtttgagaagacaagaatgattgaattacaattgacaattgacaccccttagattaatattaatttattagaagtcaactaacgcctcttagcaatgcgaaacacagttggccttttttttgtaataggagaatttatagttatggataaatcacttgaaattaacttaaaagaattagaaagcataatgtataaagaaaaagtaatcgacgttaaagagtatgataatttaaaagtaacttttgagacactaaacgatgctcctaaaagtgaaatacccactccctttacaatagaacaaatgttatataaattagaaactaaaaatttatattttcctgaaattaagtcaaaagaaaaatgtgtggagcttttacatagtgttggctattataatttgaagcattttatgtataatgaatttggtaaagatgagccgaaaaattttgatgaagtatatatactttataaatttgatagatatttattgaaacaattatttagtttagtaaatatgttggaaactcatataagaaatattattttagaagtatatatgttagaaattgagtataataacaagccttcgacactgttctatttagataaagatttatattttgagaaagttaatgatgagtataaatattctgccaaaaagctaaaagagttcaataggttacaaaatgttttttggagagctatagaaaaaaagaaaagtaacgataacgttaaacataatattaaaaaatacaatattataccagcttgggttttattccaaaattttagttttggagatttgtctactttttatagaactacattaccaacttatagaaataaagtaagtaagcgaattgaaaatttaatagaaaaaaatactggtataagcataaaacttccagaaaagttattgtgtgcatggttgaatagtatcaggtttttgagaaatagaatagctcacacagatataatttatggaattaattttacaaacacctgtgcaaaacatcatagtgatgaggaaatgtatgtaaatatagaaaagtataaatatcagcaaaggttagttacatttttattagctatgaagaaaatatttatgagtatgccagaaaataatattattgaatggaatgagactctaactaagatagagaataaatgttcagaacataactttattaaactttctaggttaggagttattgaaaataacctttcttactttaaaataactaaataaaaaatagcgcacactaataactaagtgattgtctttttacgctgaataatgccctgtgttgtagttagaaagattttcaaataacactatatttataaaaatgttgaattataatatggtcggtttattttataggagtaataaaaagcatttatcttttatccgccacaaataatgagtaaatgtaccttgctttcaatgttgatattttacaaccttgtagagttgatttgatatatcatctcatacgttgtaggcaatgaatacgtaaattatgcagtgacatgaactgttgagaagtatagagcattaaaaatcttgatatatcaatagttataaactggtacaaattaacgaaaagtactcttgtcatcgagtgggaataattatatatagcaaatgataggctagaagtaccgttattatgcggtttctagccttttttggtgcgattggtatgggcaacatcatgtgatgaaatgatgggagttatatctgtagaaattggcgtaccaatttctttatgttggggctccgcagtcaactactaccaatataagattgtagagcctacgatttggattttatgtcctgggatcggtttcctattcttattaaataatatttaaaaatctatactatctatattgaaatttttatttatggttatgccataactactttgtatttccggtactaaactttgcaatattggataatagttattagcgaaaccaataataatggaattaatcacattgatactaagttctttatcttcaggtaatgcattttctattattttgattaagtctatatattttatttcatcagaatttttatgtgctaaatacttcataaaatcagtttgcactttttcgaaaacgctatatcttaagtccatttgtacaaatattaagctgacagttttagtttcgaattgactttgacccaaaactgaagcaagttcttctattgattgatatagcaatctgatatcgccgttatcttcaagcatatgaaacactcctttatcattttagaataaccatgcaatggcttctttgactacagttgagattattccagcatcacttttacttagaccggcatttattgcgcctcgtttaactgcatcaccgacagcgttagctggtacttctgaccattttagcaatggtttcaattcttttacaatacctgaataccctttatcaaaaatagttgcagcttttttgccaccaacttgttgtatgacattttttgctttgcccctattattaataattagctttatagcagttttaactacttttgttccgccaattcgttgttgtgcttctggattcattggcaagttaggattgcgattaattttcacaccatttatattttcataactttggtgagcagtttttgtattgtttgtctgtatttcatttgcgttagttaaaggtgaaacagacgttaataaaacggcagtcaagactagtgaaccaatagcttttgtgattttcattatacatttatctcctttaatagtgaatttgcaaaaccaaatgtttgaaatataagtaaataatcattaaaaaaacaaagtgagtgaaaggtcctaattcgtataactagcatttaataatttaattaatcgttttcaccaaaatagaaaatgccacttaacacaattattaaaagtaatgtaactatgaaagaagtccaagctaatacaagtgaacatattaaaagtactaatgaagtgactgtttgtaagaacccaaaaagtaaagattccattatataagcaaaataaatagttagtgaaaaaattgctacagcaagtaacatttgccctatgattttcaaaattccagttgtgtagccagtaactaataaatttttcacatgaacttgattaccatattgccatcccgttcataaaatagtttagaagagattgctattaaatttaattgttttgcataagtgtcagaatattattcttaactgttaagagtcgttaatttatttaaatctattaagattgttagagattattatgcgctgggaaacgccactgttacagtggaagaggaatttggataactagatatgttaatcgtaaatgtggcgtcgtgaaacacgacttcaacatcttcgatcaatctatctttgagattggtcgaagattgaaacatatgtaagaaaacgacatagtttatggaaagctcggtaagtagttgaaaaatcaatctagattgaaatcatgcatatcgtttaataaaatttttcggagaaataaaaacttactaaaaacgaaaaggtttatttgatttatttacttgtatattgtaaatggttaaaatgagtctatagattatgtagagaactctagtatgccttttgagtatatgtgggattctttctttatataaaaggagttcggagtggcaacactaaaagatgtaaagactggtaaaaaggaaattttgccatcaactgcaaaagataaaaatggtaaaaatgttacgttaatttattttgaaaaagacggtaaattaggtttttatgtgcagaaaacacaaaaagaacgtggagtagggaaatgcgtttctggtatagcgggtggcgcagtgacaggaggcactactttaggtcttgcaggtgcaggagtaggaacagttactattccagtaattgggacagttagtggaggcgtagttggagctgttggtggtgctgtcggcgggggtctaaccggtggagccacattctgctaatagtgtaggagtgataccatgaaaaaattttttaatctatgggtatgttcgttcttatttttagtaataatatcatgggtaataattagtataaaatttggtaatatcagcacgatgcaaatattaatttctaatctgtttatatttattgcttatttactatatttagttaagttcattcgtttcaaaaaaacagtggcgatcagtaaacaagtataaagaaagtcgattttgtctttctctcgaacatatataagtttatatagatgtagagctattttttatttgtaaattattttgtaattgaaaatgagtatgaacatgttctccaatcaacagagtatgtctcggaagaaatctattatacttatgtgaataagtcataatgtcagacatatatataataagacgaatagattgtaaatagctttttacttttaattgttgatattccaatattagtacctatatttattgaagatatagtgagatttgaggatagatgtattttaaattatagaattgatgatttatttcaaatattaatggaattatatttgaaaattaataacacttagattaatattaatttatcagaagtcagctaacgcctcttaacaatgcgaaacatagctggcctttttttgtaataggaaaatttatagttatggctaaatcacttgaaattgacaaatctataattaaatacgcacgtaagtaattttgatcgttcattgttattgttttatgttttaggaaatgtgctattgaaaggtttaaagatgattggaatttcttggtttcttgacttatatagttatgaaagagggcgttgtccttaatggcatttctgagatcagaaatgctattaataaacatttggaatatacaaatataactgaagaatgtatttaaaaacttagaatgtatatctatccttaaatagttgtagtactattgatctttaaacataagatgtaaatggaaaagatattgtattttaacaacatttcaatttataatatatttgtatgtcatatttctagcaatttttatagttttatagctatttaattcgtatttgagataaaaggagaggtttggatgggatatagaatagaaacaagaacgtttgaagagttagaaggaaaattaaagttaccaacttttcaaagagcactagtttggtctaataatcaaaagcaagaatttttctcaacgctgaaagatggttttccttttggttctattctgttatacgaatatgaaaatgataataaatacagtcttattgatggcctgcaaaggtattctacaatggtagatttcatggagaatccaacaaactatattgaatttgaagattttacattgaaaattgctgaattgtataaaggggcatcagagagtacaaaagcagaagtagttaattatgccgaagatattctgctgaaaattattgaaaaatatattgattctacaaaagaaaatgtaaaagtaaatgaactagctaaaaaaatggtagataaatttccagtattaggtgaaacagatattagagatgaaatcactcaaatacagtcagatgttattacttattttaataatcaactagatattagtaatgtcaagattccgtgtatcttctttgaaggagaagagactgaattggcagaagtttttcaaaggttaaacagtggaggttaaaagttatcgaagtatcaagtttttgctgcacattgggacagatatgaagttgaattgggagatttaaagtatagtgatgagatacttaaaaatgtaatagaaaggtacgaaaaattaaataatgatagaggtatcttaattgaaaattttgaccctaaagaaatggagacgtcaagagtaattaatttatctgaattatgttatggacttggtaaagtgatttctgatgaattacaagcattttttaaagagtcaacagaagatatatgcaatgaattaggatttcaaacaatgctaattgtatttggcattcctacaaataagatgaatgagttaccatataaatatcaatatatgaagaataaaaataatatagaaatcttgtttgaaaaaattgtgaagatatataaaataataaataacaagtttaaagaagctttctctatggtagtatcgtcaagagaagataaatatgaaactaaatcttttactagattacaaataatgtcattcttttcatctttatggatctcatcgtatagtattgaattagatgaaaataaaaacacattttctattaaacaaactaaatctttgaaaaaaaatcaacaagtgattttgtctaatatcataatttatgcaatttatgatgtgataagaaagtactggtcaggaacaggtgatcgaaaattaatggatatatacatatctcaaaacaatagatatttaaagccgttagcaaaagaagtgtttagaaatgagctacttagatggaatgaagagaatataaataagacaagtattaatattcaaacggatgagaagatgatcattacttttattgctaataaatttagaagcttctattcatctttgaatgataatttagattatgaacatattttttcaagaaaattatacaagctgcataaaggtaatgcaataatccctgctggatctttaggtaacatcatgttacttgactctggtattaatagaagaaaaaaagaaaaatttctttattcagcaatagatattgataaggcatctattacgggaactatagaaaatcagtatgttaacaacagtttttatccagataaaagaacaatagatactattgaaatagatataattgatgaaaaatatgatagtttaataaaaatgatcaaaaatcgtggtgataaattaatagaagaagttgttagagaattatataaataagtttgatatatcttgctttttattatcacgctagttgatggtatctttaaagtgtgtattacctgattgatatcaataccaggtatcgaatgaatatttttaaaataattgagttgttgtgctaattgaatcatggcatcatttaattgtttgatacgatggatagattgttttaattgtttaggcggcctttgttggtcgccatttttatataataatataaatgaccaaaccacagcacctattaatttaagagtgaggtcatttttaaaggtaaaaaaggagtaattttatatattaaaatgatatataaaacaagtagtattagtatgttgtgaattgttatagaatttgacttgttagcaatttcgtagttattgtaatagcaagtactgtatggttttattttttaaagttagtgaaataatattggatttttgaagtgaaatatttgtagatggatacaacgaagcatattagaaatacaaaaggaacgatgaaattaaatgtccatcattccttatgcctagtagttttttagttaatatatttaattgctaacttattattagggtctctttcaagaattttatttgcgaccaattgaatattctcatgtgaaatcatattaaagtctggttctccaaggatttctaaaaattcgtataataaattagcattattaaattgcgaaatctctaacgattgccaataatgatagtatgctaaatcataggcattatctatgtaattgaaatgaaagtgatagatgcttgcgaccatttcatgatattcaattgtatttatttgattcgcaagatttgataaatatgatactaatttttcatctgaaatttcgttcgacataaagtatgttagaatattctccatatctttattctctaacatattttttaattcagttggtaataaatttaatagaatgttaacgcttttcatttatttaacccatccattcgatatatatattgccattttttcgtgtataagttatgactacagttctatcactcatgacaagtgttttttggtatgcggactttttgtatcggctttgctttccatacctcataacatgcgacattactttagaaacatctttccaattgtttttagtaactttattccaattatgtttactagcaagaatatgttttcttttattagctcctagattggctacagaaggtaaaaatttaccaaaactctttgttttgatagcggtttgagttgctttttttccatatgttttaattgcatagtttattccgtatcagctacagcagctaatattactaatggcaatgcagaagatttagcttcaattgagttgaattttattatttcgccagtttctttgtcgattaatgtagcttcatattcttcattttcaaattgttctacgaaaacgtcataatccttatttattagttttccattttcatcgacgtatctgcccttatcatccatagtattagtattcaaatcatattgaatatttttatctaaatcaatatcttttttcgtttttccactaacgtctttttcaagctttatatttacaatttttaagcagaagtatcccattatttcaaggtctgatttatctataattaaatacgtacgtatggaattttgatcgttcatttttattgctttatgttttaggaaatgtgctattgaagggtttaaagatgtttggaatttcttggtttcttgacttatatagttatgaaagagggcgttgtcctttattaaatttctgagatcagaaatgctataaataaagtgattaagattttttgttttcatgtaatttaagaaatggatttgttttttgtgggttatttttaattctattatgaaatggtttgaattttgcagttgcaaatatgatagctgcttcttttgacaaagtaatagaacctttttcttctggtaccatgatattcactccttgtacaattcaatttaagtattataaaataattttactatacaattacctttgtgtaaatcgtttcttattgttaccaaattatttgtttaaaagcgttatgcaatgccaatcaacactaatggggtgtaagtatttccctgttaatattttattagcgttatttacatataccttctgtaatgtgaatttttaaaattacagtttacatggaacgttgtggcgtatattctgtatatagaagtgtaaaaacacaattgggttggtagtcctaatgcagttttaaaactgtcagtaaccttcctcctcgggtcgtccgtcatttctaattaaactagaggagggatagcatggagctatctattttttacaatgggcaattttttgtagcattggtagaatataaaatgggaaataaatcaaaatttatccaatacacatttgggaatgaacctgatgatatagaggtattggattttattcatcatcaattaatgaaaatgattgatgatatgcaaactattgtttatacgaaaaatatttctagaaaagtaaacccgaaaaggctacaaagacaaattgctaaggagcaaaagaaacctaaatactctacccaagcacaaatagctattaagaaagaattagaattaaagaaaaagcaaaagcggaagaactataaagaaaaacgtgatgcatttcaaaaaagaaaaagagaaattaaaaaggttaaagcaaaagagaagcataaggggcattagcaatacgacaaataaattaaagcaaaatgatttataggtggttgggatgattttaattagttcgtgtttgataggcgaaaatgtaagatacgatggtggcaatcaattggatgttagattgaaaaaattaatagacagtggaaaagctattcacgcatgtccagaattgcttggtggattgttaattcctagagaacctgcagaaattattggtggagatggttttgatgtgtggaataacgctgcaaaggttgttactatttctgacaaagacgtaactgacgattataaacatggagcaatagttacattaaaaattttgaaaaaatatcaatgtgatacagttattttaaaagcaaatagcccatcatgtggatcacaagagatatatgatgggaattttacaggaaataagaaaaagggtgtaggtgtggcaactgctttactcattaatgaaggtataaaagtttatgatgaaaatacgttttttgaccaaaaccatgattgaaacgatagtacatgaaaagtaagtattgaggatatacgtaataaaccaagtgtttaagttgtgcgatgttttataaaatattttttaaaatcgttgaaaggatattcaagttgtgataatatatcggtacagataattttgttaacagatccatgagagtaggaaccccaccatacgggaatttcgaaatcatggattttttgatataaaggagtgatgtaatggaaaaagtagccattttagtagatggtggatactatagaaagataagcgcaaaagtctacggaaaagttacagcgaaagaaagagctgacgagttatatagttattgcaatagacacttaaaagagacacatttcaaagaagaaatatataataaattatacagaatattttactatgattgtcctcctattgataagatagtttatcaccccttattaaaaaagaatgtaaatttttccaatactgatacgaaaaagtggacagaagactttttcaaagaaatgagcaaaaaaagaaaggtagcattgaggttaggagagttgagtgagtattcagttgaatacaacttaaaatactctattacaaaaaaattattaaatggaagtatcgatttaaatgatttgaaagaaaaagatttttccctatcattacaacaaaaaggtgttgatatgaaaataggtttagacatagcttcattatcatttaaacatcaagtagataaaattattttaatagctggtgatagcgattttgtacctgctgctaaactagcaagaacagaaggaattgattttgtattagattctttaggggcagatattagaaacaacttgtcattacacattgatggtaggcgtacttgtgatgaaaaatttaaattttatttaaatcaactatttaaataataatttttttaaaacgcatcttctactttacagacgtttatagctattagtatttatcagctgaaaattaaatcagatatgggttttcttcattaaataatttttctataaggaaacagaggcaacgttactgtcacctctgcttgaaataattaggatgaaatactctgagtttatgaacgtccacacccaaaacactcaaaccctccaaactctcaaccccagactacatctccaaacccccaaacaccaatatttaccaaagcattgatatgagtgccaatactggcaatgtgccttgtttgaaaaagatactaatattgcttgaaaggccaccataaatagcaacgccaatgatatacactaaaatagctgcgcatatttcttttggattactgctgataaacaaaccgtatattagcaaaattccgattaaaccgttatatacgccttggttcttcaaaagtaggttaatatttttgtctttcaatttatcgacgcttatattaaatgtctcgctagtctttttggaagttgtagcaatcgtttcaaggtacataatatagaaaaactctaatgccacaaatatgattaaaattatcgatatgatattcactgtatcgctcctttattattaaatattttcttgtaaaaatgattgtagtgtctgtggttgatcattgactaattgttggaaatcattggattcttggtctaatagtcctcttgctcctgcgttgtacattgatgccaataatgcaccaaagcctttaggttcatcgtacatttctgcaaatgtctctaatgaaacgggctcatatttaatttctgtgcctgatgcctcagataaaatagcagcaagttctttcatatcataactgtagcctgataataaatagcgtttgccccaagtatctggatttttaataatagcaatgacacctctagcaatatcatttctagtaatataattaatacgaccatcaccagctggataaatcagtttatgcatattcatcaattctggtaaatatggtttaagtggatccatgtacattgccattcttacatacgtatagtcaatgccacttgttgccaataaacgtgctgcataaccaaaataaggactcatatggaatggattattatgctgatctgcgtaataacctatgaaaatgatatgagcaacgccactttgctttgccgcatatactaaattttccacttcaggaatacgtttgaatgatggatgaataatacttggaataaacacaacggtatccatttctttaaatgcttctaccatgctttcttgattaaaataatctaattgtcgaacagaaacttttccacgccaatcttctggaactttctcaacatttctaacaccaatgtgaaaatgatctatgtgatttgcaatggcttgatttgtaatatgtgtgcctaaatgacctgtagcacctgttaacataatattcattcacttcatctcctaatctttatatacataacataatacttatttgatggttttcaaaacatttgattttataaaaaattctaatctgtatttattgtcgacgtgtatagtaaatacgtaaatattattaatgttgaaaatgccgtaatgacgcgttttagttgatgtgtatcactaatatctttgaaaattttaatcaggtactacgacaatatgatgtctgttttgtgtctgaaagttttacagtttttaaaataaaaatggtataaagtgtgatttgtataaaaaagagtctcgacggataagaattgattaataacagttagcattttattaattaccttaacaatgattcaagtttagttaaatgaggtttaatttgaaaggggatagcgcctcaatataatgtaggtagattgttcatattacgtaattgaaaaatcaaatttaaatagattggggctaaaaattatgaaatttaaagcgatagcaaaagcaagtttagcattgggaatgttagcaacaggtgtaataacgtcgaatatacaatcagtacaagcgaaaacagaagttaaacaacaaagtgaatcagagttgaaacactattataataaaccatttttcgagcgtaaaaatgtgactggatataaatatactgaaaatggtaaagattatatggaagtcgcaacagatcatcagtattatcaaatatcgttactaggtccggataaagataaatttaaagaaggaaataatccaggtctagatatatttgtcgttagggaaggtgacagtaggcaagctgcgaattactcaattggtggcgtaacaaaaacaaacagtcaaccttttattgactatatacacacaccaatccttgaaatcaagaaaggtaaagaagaaccacaaagtagtctataccaaatttataaagaagacatctcattaaaagaacttgattatagattaagagaacgtgcgattaaacaacacggcttgtattcaaatggtcttaaacaaggtcaaattacaattacaatgaatgatggcacaacacatacaatcgatttaagtcaaaaacttgaaaaagaacgtatgggtgagtcaatcgacggcactaagattaataaaattctagtagaaatgaaataatactttctaacaacaaagcgctatgttgaatagtgcttgttatggaaatatatggaagttaagcgacgtactgttgcttagcttctttttttgaggggaaaagttacaaaactcacacaaacagtcgcaccacgcattatcttttgcttaaatagcttaatcatattttatgaatagttaaaaacaggttaatgtgaatatcagcacacagctcctataatatgggtgtatgattcaaattacgtaataaaacaatctaattataatagattggagcacacaactatgaaaatgaaaaatattgcaaaaataagtttgttattaggaatattagcaacaggtgtaaatactacaacggaaaaaccagtttatgccgaaaagaaacctattgtaataagtgaaaatagcaaaaaattaaaagcttattataatcaacctagtattgaatataaaaatgtgacaggttatatcagtttcattcaaccaagtattaaatttatgaatatcatagatggtaattctgttaataatcttgctttaattggcaaagataagcaacattatcatacgggtgtacatcgtaatcttaatatattttacgttaatgaggataagagatttgaaggtgcaaagtactctattggcggtatcactagtgcaaacgataaagctgtcgacctaatagcagaagcaagagttattaaagcagatcatattggtgaatatgattatgactttttcccatttaaaatagataaagaagcaatgtcattgaaagagattgattttaaattaagaaaataccttattgataattatggtctttacggtgaaatgagtacagggaaaattaccgtcaaaaagaaatactacggaaagtatacatttgaattggataaaaagttacaagaagaccggatgtccgatgttatcaatgtcacagatattgatagaattgaaatcaaagttagaaaagcataacacacatacttgacgacgaaataatttgaaattgaaatagagaggttaagtgacgatcaaacgttgcttaacttctttttaatgcttaaaaatcatttcaaaggcacatagaaacgctatattaacctcataatcactcattattttttgcttaaattacttaataatacttcaataattgttaaaaggggtttaatgtgattatcttagaatgccatctataatgatgttgtatgattcaaattacgtaaaaagacaatcgaatataatatagattggagcatacaattatgaaaatgagaacaattgctaaaaccagtttagcactagggcttttaacaacaggcgcaattacagtaacgacgcaatcagtcaaagcagaaaaagtacaatcaactatagttgacaaagtaccaacgcttaaagcagagcgatcagcaatgataaacataacaacaggtgcaaatacagtgacaacacaagcagctaacacaggacaagaacgcacgcctaaactcgaaaaggcaccaaatactaatgaggaaaaaacttcaacttccaaaatagaaaaagtatcacaacctaaacaagaagcgcagaaattgcttaatatatcagcaacgccagcgcctaaacaagaacaatcacaaacgacaaccgaatccacaacgccgaaaactaaagtgacaacacctccatcaacaaacacgccacaaccaatgcaatctactaaatcagacacaccacaatctccaaccataaaacaagcacaaacagatataactcctaaatatgaagatttaagagcgtattatacgaaaccaagttttgaatttgaaaagcagtttggatttatgctcaaaccatggacgacggttaggtttatgaatgttattccaaataggttcatctataaaatagctttagttggaaaagatgagaaaaaatataaagatggaccttacgataatatcgatgtatttatcgttttagaagacaataaatatcaattgaaaaaatattctgtcggtggcatcacgaagactaatagtaaaaaagttaatcacaaagcagaattaagcattactaaaaaagataatcaaggtatgatttcacgtgatgtttcagaatacatgattactaaggaagagatttccttgaaagagcttgattttaaattgagaaagcaactcattgaaaaacataatctttacggtaacatgggttcaggaacaatcgttattaaaatgaaaaacggtgggaagtatacgtttgaattacacaaaaaactgcaagagcatcgtatggcagatgtcatagaaggtacaaacattgataaaattgaagtgaatataaaataatcatgacgttctctaaatagaagctgtcatcggaaaaacaagaagttaagtgacaacggtttacatgttgcttagcttcttttattatgcgcaatgatgtaaaaagacgaatattcatttgtttgtaaaagtggcatttctatgtcttaaaagtgacgaaacttcaaatgtgccaagtgttgaatcacatcaaaatcatttttatttaacgaacattatggatttcttaatttacttaacgatgattcaaatatagttaaacaaggtttaatgtgaatggagcaatacgccatctataataaagctgtatgattcaatgaatgtaatcgaacaaatctaataattacgaatggagcatacaactatgaaaataacaacgattgctaaaacaagtttagcactaggccttttaacaacaggtgtaatcacaacgacaacgcaagcagcaaatgcgacaacaccaccttcaactaaagtggaagcaccgcaacaaacaccgaacgcgacaacaccatcttcaactaaagtagaagcaccgcaatcaaaaccaaacgcgacaacaccatcttcaactaaagtggaaacgccacaatcgccaaccacaaaacaagtaccaacagaaataaatcctaaatttaaagatttaagagcgtattatacgaaaccaagtttagaatttaaaaatgagattggtattattttaaaaaaatggacgacaataagatttatgaatgttgtcccagattatttcatatataaaattgctttagttggtaaagatgataaaaaatatggtgaaggagtacataggaatgtcgatgtatttgtcgttttagaagaaaataattacaatctggaaaaatattctgtcggtggtatcacaaagagtaatagtaaaaaagttgatcacaaagcaggagtaagaattactaaggaagataataaaggtacaatctctcatgatgtttcagaattcaagattactaaagaacagatttccttgaaagaacttgattttaaattgagaaaacaacttattgaaaaaaataatctttacggtaacgttggttcaggtaaaattgttattaaaatgaaagacggtggaaagtacacgtttgaattgcacaaaaaattacaagaaaatcgcatggcagatgtcatagatggcactaatattgataacattgaagtgaatataaaataatcatgacattctctaaatagaagctgtcatcggaaaaacaagaagttaagtgacaacggcctacatgttgcttagcttcttttgttatgttcgatgatttgagaacccgaattttcaatgggtccaaatatgacgtggaagagtcctgaatttatctgtaaatccctatctatcgggtgtggatcacaacggaatcagttttatttaacgaacattatagattccttaatttacttaataatgattcaatgattattaaacatggtttaatgtgaaaggtcaaatacgccaattataataaagctgtatgattcaatagacgtaagcgaacaaatctaataattacgaatggagcatacaactatgaaaatgacagcaattgcgaaagcaagtttagcattaggtattttagcaacaggaacaataacatcaacgcatcaaactgtaaatgcgagtgaacatgaagcaaaatatgaaaatgtgacaaaagatatttttgacttaagagattactatagtggcgcaagtaaggaacttaaaaatgttactggttatcgttatagcaaaggtggcaagcattaccttatctttgataaaaatagaaaattcacaagagtacagatatttggtaaagatattgaaagatttaaagcacgcaaaaatccgggattagacatatttgttgttaaagaagcggaaaaccgtaatggcacagtgttttcatatggtggtgtcactaagaaaaatcaagacgcttattatgattatataaacgcaccaagatttcaaatcaagagagatgaaggtgacggtattgctacgtacggtagagtacactacatttataaagaagagatttcacttaaagaactcgactttaaattgagacagtatttaattcaaaattttgatctgtataaaaagtttcctaaagatagtaagataaaagtgataatgaaagatggcggctattatacgtttgaacttaataaaaaattacaaacaaatcgcatgagtgacgtcattgacggtagaaatattgaaaaaatagaagccaacattagataatgcaatgaaatatggataatagtaaaatatggatagtatagaggagttaggcaacataagttgcttagcttcttttttgtgttggagagatgaaaaatagaagcgggttcatgatcaaaattttggaaatagttgatacctatagtcgcgcgttgtccttttcgtgacatgaaacaatgtggaaaacataattaaattgagggaaagtgtgaatagttaaaaaattagcattgtgttataaaaaataattaatactgttagtatttcattaactaacttaacgttggttcaaaaatagttaaaaagaggttaattcatagcgcagtatctcacttatataatgatagtagattgttcgtattacgtaattgaattaatcatataaaaatatattaagacaaaatttataaatagattgggagaatagtactatgaaattaaaaacgttagctaaagcaacattggcattaggcttattaactactggtgtgattacatcagaaggccaagcagtccacgcaaaagaaaagcaagagagagtacaacatttatatgatattaaagacttacatcgatactactcatcagaaagttttgaattcagtaatattagtggtaaggttgaaaactataacggttctaacgttgtacgctttaaccaagaaaaacaaaatcaccaattattcttattaggagaagataaagctaaatataaacaaggacttcaaggtcaagatgtctttgtggtaaaagaattaattgatccaaacggtagattatctactgttggtggtgtaacgaagaaaaataaccaatcttctgaaactaatatacatttattagttaataaattggacggaggaaatttagacgctacaaatgactcatttttaattaataaagaagaagtttcactgaaagaacttgatttcaaaattagaaagcaattagttgaaaaatacggtttatatcaaggtacgtctaaatacggtaaaatcactatcatcttgaacggcgggaaaaagcaagaaattgatttaggtgataaattgcaattcgagcgcatgggcgatgtgttgaatagtaaggatattaataagattgaagtgactttgaaacaaatttaaagtaagtaatcaatgactctaaagtaataaatttgaagcagcttaacgatgaaatgttgaatagatacatacaccttacataaaggagcgtatctaaatcaacagtgtcgttaggctgtttttatgttttataacgtaggttatgagcatactaaaaattcaaattactcctgaaagtgatgtccattgaatattaattagaacttcattaaccatgatttaagtttaattaaacgagtgttaatgtcagcctgtctcaatgccctttataataaatgtgtattattcaaattacgtaataaaagcaatccaatatattaagattggagcacatgaatatgaaatttacagcgatagctaaagcgatatttgtattaggaatattaacaacaagtgcaatgataacagaaaatcaatcggttaatgcaaaaggaaagtatgaaaaaatgaaccgtttatatgatacaaacaagttacatcaatactattcaggacctagttatgagttaacaaatgttagtggccaaagtcaaggttattatgactctaacgttttgctttttaaccaacaaaatcaaaagttccaagtgtttttattgagaaaagatgaaaataaatacaaagaaaaaacacatggtttagatgtctttgcggtaccggaattagtagatttagatggaagaatatttagtgttagtggtgtaacaaagaaaaatgtaaaatcaatatttgagtctctaagaacgccgaacttactagttaaaaaaatagacgataaagacggtttttcgtatgatgaatttttctttattcaaaaggaagaagtatcattgaaggaacttgatttcaaaataagaaaactgttaattaaaaaatacaaattgtatgaaggggcagctgataaaggtagaattgttattaatatgaaagatgaaaataagtatgaaattgatttaagtgataaattaggtttcgagcgtatggcagatgtcattaatagtgaacaaattaaaaacatcgaagtgaatttgaaataatcaatgatatatatagaatgaaagcttaagaagcggtttaataatcccatgtttaatgattttgatacgtgttttaataataaaaacatatcgaacattgactacgttattaagctgcttttttgtacactttgtatcgaataacttaagatctaaaactaatcggaaagaacaatgattcccctaaaaaaatttatgttgctattaaaaatcagttaatacgaatgttaacatacgtttgattttcattaataatgattcaagtttatttaaatgagcgttaatgtcagtctgttttgatgcaccttataataaagacagatagttcaaattacgtaataataacaatccaatatatcaagattggagcaaataaatatgaaatttacagcattagcaaaagcaacattagcattaggaatattaactacaggtgtgtttacaacagaaagtaaagctgttcacgcgaaagtagaacttgatgagacacaacgcaaatattatatcaatatgctacatcaatactattctgaagaaagttttgaaccaacaaatattagtgttaaaagcgaagattactatggctctaacgttttaaactttaaacaacgaaataaagcttttaaagtatttttacttggtgacgataaaaataaatataaagaaaaaacacatggccttgatgtctttgcagtacctgaattaatagatataaaaggtggcatatatagcgttggcggtataacaaagaaaaatgtgagatcagtgtttggatttgtaagtaatccaagtctacaagttaaaaaaatcgatcctaaacatggcttttcgataaatgagttgttctttattcaaaaggaagaagtatcgttgaaggaactggattttaaaataagaaaaatgttagtcgaaaaatatagattgtataaaggcgcgtcagataaaggtagaatcgttattaatatgaaagacgaaaagaaatatgtaattgatttaagtgaaaaattaagttttgatcgtatgtttgatgtaatggatagtaagcaaattaaaaatattgaagtgaatttgaattaattaagtataataacttaagaagcgacttaacgacaaaatgtgaattggcatttgtgtccttatataaggaactgtgttaaatacattactgttgttaagttgtttttgtaattcaaagagcagaacagagtaacatcatcagttgtagtaatcgataatccggtaaaacaactaaatgaaataatgaaagtcatttaacctgaacattaaaatatatttgtttttcattaagaataattcaagtatatttaaatcgaggttaattatcgtatgaaacgatgcacgttataataaaaatgtatgattcaaattacgtaatgaaaacaatccaatatattaagattggagcaaataaatatgaaatttacagcattagcaaaagcaacattagctttaggaattttaacaacaggaactttaacaacagaagttcattcaggtcatgcaaaacaaaatcaaaagtcagtaaataaacatgacaaggaggcactataccgatactacactggaaagactatggaaatgaaaaatattagtgctttgaaacatggtaaaaacaacttacgttttaagtttagaggtattaagattcaagttttactgcctggaaatgataaaagtaaatttcaacagcgtagttatgaggggttagatgttttctttgttcaagaaaaaagagataagcacgatatattttatactgttggtggtgtaatacagaataataaaacatctggagttgtcagtgccccaatattaaatatttcaaaagaaaagggtgaagatgcttttgtgaaaggttacccttattacattaaaaaagaaaaaataacattaaaagagctggattataagttgagaaagcatctaattgaaaaatacggactttataaaacaatctcaaaagatggtagggtcaaaattagcttgaaagatggcagtttttataaccttgatttaaggtctaaattaaaatttaaatatatgggggaagtcatagaaagcaaacaaattaaagatattgaagttaacttaaagtaaataattaaaagtaattgaagcggcttaacggtgaaatgtaaattggtgcgcatagcttatacaaaaaggatgcatcaatcgatatcgtcgttaagccgtttttgtttgtgtgtcatgaatcctatcccaatctccataaaggtaaaattcccaccaccaacatcaaaattctcaacatcgcaacataaccaaatgttataataaatctattacacaaagagataaattacttattcaaaggcggaggaatcacatgtctattactgaaaaacaacgtcagcaacaagctgaattacataaaaaattatggtcgattgcgaatgatttaagagggaatatggatgcgagtgaattccgcaattacattttaggcttgattttctatcgcttcttatccgaaaaagcggaacaagaatacgcagatgccttgtcaggtgaagacatcacgtatcaagaagcatgggcagacgaagaataccgtgaagacttaaaagcagaattaattgatcaagtcggttacttcattgagccacaagatttattcagtgcgatgattcgtgaaattgaaacgcaagatttcgatatcgaacatttggcgacggcgattcgtaaagttgaaacatcaacgctaggtgaagaaagtgaaaatgactttatcggtctgttcagcgatatggatttgagttcaacgcgactaggtaacaatgtcaaagaacgtactgcactaatttccaaagtcatggttaatcttgacgatttaccatttgttcacagtgatatggaaattgatatgttaggtgatgcatacgaatttcttatcgggcgctttgcggcgacagcgggtaaaaaagcaggtgagttctatacaccacaacaagtatctaagatactggcgaagattgtcacagacggtaaagataaattacgtcacgtgtatgacccaacatgtggttcaggttcattactgttacgtgttggtaaagagacacaagtgtatcgttatttcggacaagaacgtaacaatactacatacaacttggcgcgtatgaacatgttgttacatgatgtgcgctatgagaacttcgatatccgcaatgatgacacgttggaaaatccagcctttttaggcaatacatttgatgcggttattgcgaacccaccatatagtgcgaaatggacagctgattcaaagtttgaaaatgacgaacgctttagtggttacggcaagcttgcgccaaaatccaaagcagactttgcctttattcaacacatggtacattacctagacgatgaaggtaccatggcagttgtactaccgcatggtgtattattccgaggtgctgccgaaggtgtcattcgtcgttatttaatagaagaaaagaactacttagaagccgtgattggtttgccagcgaatattttctatgggacaagtattccaacatgtatcttagtatttaaaaaatgtcgccaacaagacgacaatgtattatttatcgatgcatccaatgattttgaaaaaggaaaaaatcaaaaccatttaagcgatgcccaagtcgaacgtattatagacacatataagcgtaaagaaacgattgataaatatagctacagcgcgacattacaagagatcgccgataacgattacaacttaaacataccgcgatatgttgatacattcgaagaagaagcaccgattgatttagatcaagtccaacaagatttgaaaaatatcgacaaagaaatcgcagaaatcgaacaagaaatcaatgcatacctgaaagagcttggggtgttgaaagatgagtaatacacaaaagaaaaatgtgccagagttgagattcccagggtttgaaggcgaatgggaagagaagcaatttgctgattttactaaaataaatcaaggattacagattgctattaatgaacgtaaaactgaatattctccagagttgtatttttatataacaaacgaatttttaagaccaaatagtcaaactaaatattttatcgaaaatccccctcaatcagtaattgcaaataaagaagatattttaatgactagaacaggtaatactggaaaagtagtaactaatgtatttggagcgtttcataataatttttttaaaattaaatttgataaaaatctgtatgatagattgtttttagtagaggttttaaattcatctaagatacaaaataaaatattatctttagcaggatcttcgacgataccagatttaaaccatagtgatttttatagtattagttcttcttatccgctgcttagagaacagcaaaaaataggtaaattcttcagcaaactcgaccgacaaattgaattagaagaacaaaagcttgaattacttcaacaacagaaaaaaggctatatgcagaaaatcttctcacaggaattgcgatttaaggacgagaatggaaatgattatccggattgggagaaaaagaaactaaaagaaatagcttgtgtttatacaggaaacacgccaagtaaaaaagaaaatatatattggaataagggtgaatacgtttgggttacacctactgacattaataatagtaaaaatatttatgaaagtgaaaacaaattaacccaagaaggctataaaaaagcaagacaattaccagaaaatacactattggttacgtgtatagctagtataggaaaaaacgcaatattgagaaaacagggctcgtgtaatcaacaaataaatgcagtagttccatttgaaaatataaatatagattatctttattatatttctgattcattatcaacgttcatgaaatctattgcaggaaaaacggctacacaaatagttaataaaaacactttcgaaaatttggaaatttatttagctccttttgaagaacagaataaaatagcagatttaattagctcactagaagaattaattgaaaagcaagcatcgaagttaattaaaatgaagagtcgtaaacaaggaatgcttcaaataatgtttatttaagagtaagaagaattaactattttgataaggcgaattgattttaatgattgcgtcgagttaaaaatatagtaaaaataaatcgaaataaatacgaacattaaatttagacactgtgatagtacgatgtcttttttgtgtcgaaattgtgtacagaataagtagttaaataaagattaagttgagataaagtgttattcgtaaataaaagagagtagatcgataggaattgaatgatattagttaactatttattaaattacttaataatgattaatttttagttaaagtaagtttaatgtgaagcacgaccattgctcattataatgaatgaggattgttcgtattgcgtaatagaataaatcaaatagactaaaaattgggagcatagaattatgaaattaaaaaatattgctaaagcaagtttagcactagggattttaacaacagggatgattacaactactgctcagccagtaaaagcagacgaagctagtagcagattatcagttacttcaaaagatacacaaaatttaaagacgtattatactggagcaagttttgatcttagaggattaagcggatataaagaaggagataaagtaatatttcctcaaaatggtcaacaaattgatgttacattaacaggtaaagagggagacgtggttcaatctaatgacgacgttacaaatgttgatgtgtttgctgttcctgaaggtacaggtcgttctgccataatgactacaattggtgggattactacaccaaacactcaaagttataaagacactacaaataatgtgaacttaagagtatcaaagagtacaagtcccaataccatatctgtgtctgtaaaaaattatgatatttttaaagaaaaaatttcattaaaagaacttgatttcaaattaagaaagcatttaattgataatcatgatctttataaaacagaacctaaagacagtaaaattagaattaatatgaaagatggcggctactatacgtttgaattaaataaaaagttacaaactcatcgtatgggtgacgtaattgatggtactaaaataaaagaaattaatgttgaattaaactaaaaattcgagggagcatatcatgagggaaaattttaagttacgtaaaataaaagtcggtttagtatcagttgcaattacaatgttatatatcataacaaacggacaagcagaagcatctgaaaatcaaaatatagaatctaaaaattcttctagtaatatagcatcacagccaaaacaaattaatgagaattatacaggacataaagaaaatgaaaaaggtgaagatcaaaataaacctgctaactttgtaaaattaggaagtgttaatcctggagatacatctgtcaaaggtacaacattaccacatcaaattatacttttaaatattgataaacagagtgtagaaccagtggaagataataatggtggatttgtaatgtcggatgaaaaaggagaatttgaatataaacttaaagatcgtaaaatagttcataaccaagaaatagaagtttcatcatcttccttagatggattagaagaggatgacgaagaggaagaaattgaaaaaaaatcttcggataacaaaggtgaaagtatagaatcacctatagagaaaaatgaagaagttgaagagtcaagtaatgatgctacagctacatacactacacaaagatacgaaggtgcgtataagattcctgataagcaattagaaaagaaaggcgatcatcaccagattttagtggaacctattactgaatggacaggcataattaaaggacatacttcagtgaaaggaaaagttgcattatcaattaataataaatttattaattttgaagaaagtggtaaaagcaaaaaaactttaactgaagaagaaggtaaatcaagaattgaaggtatctggaagcacattgatgataaaggatattttgattttgatttcaaaaagaaaagatttgataatttaaacttaaagaaagatgatattgtttctttgacatttttaccagaagatgaagatgaggcgttaaaaccaattattttcaaaacaaaagtaacaagctttgataacattgcttctgcatatacagaatataatcctgaaaaggtagaaaaagtaaaaactctaaataatggtttagaggacttgaatgtcaaagatatttatggttttgtatacgagagtgagcgtggtattggtattccgcaagcaaataataacgccactaaagtaattgaaggaaaaacgaaatttgccaatgctgtcgtaaaagtttactcaagtttaggggatgggcaagaattccctgatttacaagtaaatgaaaaaggagaattcagcttcgactcttttgatgcaggttataggttatacaatggtgagaatttaaactttactgttgttgatcctgttactggtaaactattaagcaaattggtaactaaagaaattgatatttatgaatcacctgaacaaaaagcagaccgtgaatttgatgaaagacttgaaaatacacctgcttactacaagttatatggtgataaaatagttggtttcgatactaatgatttcccaattacttggttctatccattaggtgaaaagaaagttgaacgtaaggcaccaaaattagaaaaataattaataaaataaaacagcttaatgatgtaatgaaactagtgagttaatcactgacttcaacgtcattgagctgttttttgtgctttgttacaaagcattattgaatttattttacgtgttcatattttgaaacatcaaagccgtcttgcttagctttgttgatgatgtctttgattgaatgtaatcctttatcggcgaagtatgatcttaagttgtcttttgtagcttggtcagcattcttatctagtaacacatcgatataacttaactcgtgttctaagaagtttgcgtcatcatgtagtacgagtccattttgagaatacactttcgcatctgcttgattaccatatccaacaacgccagttgctaatacacctaccattgccgtagctactaaaacctttttaaatttcatatctatcactcctctaaaaaatgtaactccatcataacactgaatattaagaaaattacgtttattaagtcgatttaataatttttaataaatagttaaagtggcaaatattgctaaaaagcaattaatctttagtgcgatgcttgagttccttagtattgagtagtagatttcgaagatattttaattcaaatgaaacaataataaaaaaatgatgcaacataataataagtacaaatttaattaataaattaaattgattgtatatgtatattttggtaacgtaaaagagaaatatacaaaataattaattatttatatgaaaagagaatataaatgaagtataaaacagagagacgtgaaacgatgggatatttaaaaaggtttgcattgtacataagcgttatgattttaatatttgcgatagcaggttgtggcaaaggtaatgaaacaaaagaagattcaaaagaagaacaaatcaaaaagagcttttcgaaaactttagatatgtatccaattaagaatctcgaggatttatacgacaaagaaggatatagagatggtgaatttaaaaagggcgataagggtacatggactttactcacaagtttttcaaaaagtagcaaaccaggagtaatagatgatgaaggtatggtgctatatctaaataggaataccaaaaaggcaacaggttattattttgtaaataaaatttatgatgatattagcaaaaatcagaatgagaaaaaataccgtgttgaacttaaaaataataagattgttcttttagataatgtagaagacgaaaaacttaaacaaaaaattgaaaattttaaattttttagtcagtatgccgattttaaagatttaaaaaattatcaagatggaagtataacaactaatgaaaatgtaccgagctatgaagcagaatacaaattgaataatagtgatacaaatgtaaaaaaacttagagatatttatccaattacaacgaaaaaggctccaatattaaagttacatatagatggtgatataaaaggaagttcagttggatacaaaaaaatagaatataaattttcaaaagttaaagatcaagagacaacattaagagattatttgaattttggaccgtctgatgaagatagctaaagataattagatgtagaaataattctaaaacagagagacgtgaaacgatgggatatttaaaaaggattggattgtacataagtatcttggttttaatagttatggtagcaggttgtggcaaaggtaatgaaacaaaagaagattcaaaagaagaacaaatcaaaaagagctttgcgaaaacgttagatatgtatccaatcaaaaatcttgaagatttatatgacaaagaaggatatcgagatggcgaatttaaaaagggtgacaaagggatgtggactttactcacaagttttgctaaaagtaacaagccaggtgaaatagatgacgaaggtatggttttattccttaatagaaatacaaagaaggcaacaggatattattatatgagtaaagctcatgatgaatttaatggaaaagatcaacaaaaaaaatatcatgttgaattaaaaaataataagatagtacttttggataaattagaagatgcaaagctcaaaaataaaatagaaaattttaaattctttagtcagtacgctgattttagagattttaaaaactataaaaatggaaatatatcaagtgcagataatgtaccaagtttcgatgcagaatatcaaataagtaatacggataaaaatgtaaaaaaacttagagaagtttatccaatcacaaccaaaaagtcgccagtattaaaattacatatagatggcgacataaaaggaagttcagttggttataaaaatatagaatataattttttaaaagtaaaagaccaagaaacagctgtaagagattttgtgaattttgggccgtctgatgaagatagctaaagtttattagatgtagaaataattctaaaacagagagacgtgaaatgatgggaaatttaaaaagttttgcattgtacataagtatcttgattttaatagttattgtagcaggttgtggcaaaagtgatgaaacaaaagaaaattcgaaaaaaacacaaatcaaaaagagctttgcgaaaacattagacatgtacccaattaagaatctcgaggacctatatgataaagaaggatatagagatggcgaatttaaaaagggtgataaagggacatgggttatcagttcagcaatggttaaacagccaaaaggtaaaattatgagatcaagaggtatgtatctatttttaaatagaaatacaagaacggcaaaaggatattttattgtagatgtaacaagtaacgatacattaaaaaagacagaagataaagaaaagcgttatccagtaaagatggtaaataataaaataataccgattggtccaattaatgacgaaggcataaaaaaagaaattgaaaactttaagtttttctcacaatatggtgattttaaaggatttaagaattatcaaaatggtgattattcatataactcagaagcacctacttattctgctaaatttcaattaagaaatgatgattataatgtaaaacaattgcgtaaaatgtatgatattcaaaccaaaaaagctcctaaattgttgttgaaaggtactggagatttaaaaggttcatcaatcggacataaggacattgagtttaccttcgttgagaatcaagaagagaatgtattttttactgatagtttggagtttaccccaagtgaggactattaactatgatgaaaaaaggggatacggacaatgaataattttaggcaatgcgcgttgtgtataggtacatcggtcttaattctattagtgtcaggttgcagtggcgtatttgacactcctgaagattcaaaagaaatacaaattaaaaagagctttgcgaaaacgttagatatgtatccaatcaaaaatctcgaggacctatatgataaagaaggatatcgagatggcgaatttaaaaaaggtgacaaagggatgtggacgatttacacagatttcgccaaaagtaatagaccaggtgtattagataatgaaggtatggttttaaatttggatagaaatacacgaacggccaagggatattattttgtagatactatatatgacaatcatgaaaactcttatagtaaaaattatagagttgagatgaaaaacaataaaattattttattagacaaggtggaagatcaaaaacttaaagaaagaatagaaaactttaaatttttcggacaatatgccgatttcaagagtttgaaaagttacaacaatggcgacgtttcaattaatagtaatgttccaagttatgacgcgaaatttaaaatgagtaataaagatgaaaatgttaagcaattaagaagccgttataacattcctactgataaagctccaatattaaaaatgcacattgatggggacttaaaaggcagttccgttggatataaaaagttagaaatagacttttcaaaagaagaaaatagcgaattatcagtagtcgattcattaaattttcaacctgccaaaaataaagatgataaatgatagggatggtgtgaaacaatgtggtcaataaaaagaattggaatgtacacaaatgttataattttgagcgtttttataataggctgtgatagatctagtgttactgctgaaaaagcaaaagaagattcaaaggaagaacaaatcaaaaagagctttgcgaaaactttagatatgtacccaatcaaaaatcttgaagatttatatgacaaagaaggatatcgagatggagaatttaaaaagggagacaaagggacgtgggttgttagatctgaaatgataattcaaccaaaaggtaaaagtttaacttcaagaggcatgatattatacatgaatagaaatactaggaccacaaccggttatttttcaatagaagaaatagattcaagaaaaagccttgatgaaagagaaacagaaaaaaagtatcctgtgaaaatgataaacaataaaattattccaactgaggagataaaagatgaaaagttgaaaaaggaaattgaaaactttaagttttttgtgcaatatggcagttttaaaggaatagagaattatgaaaatggtgacatttcctataattctgaagctcctatttattcagcgaaatataaactgaaaaatgatgattataatgttaaagaattacgaaaaagatataatattccaacagaaaaggcgcctaaattgttgttgaaaggttcgggggatttgaaagggtcttcagttggatataaggaaattgaatttatattcatagaaaataaaaaagaaaatatatatttttcagatggattaaacttaattccaagtgactaaaaataacacaaaggttgatagtactcaacaaatattaacatgatagagagaagtgaaaaaatgagggattcaaaaagagtagtattgtacataagcattatggtgttgagtatttttataattggttgtaatagttcaagcgagaatgcaaaaaaatcaaaagaagactcaaaagaagactcaaaagaagaccaaattaaaaagagctttgcgaaaacattagatatttacccaatcaaaaatcttgaagatttatatgacaaagaaggatatcgagatggcgaatttgaaaaaggtgataaggggacgtggacgatatatacagattttgccaaaagtaataaagcgggtgaattggatagtgaaggtatggtattacatttgaatagaaataggcggacggctaaaggatattactttgtaagaaaaacttataacgaagaggataagatgccgcaaaggaaagattatcgtattgaactaaaaaataataaaatagtccttttagataaagtagaagatgaaaaactcaaacataaaatagaaaattttaaattttttgggcaatatgcagattttaaagacttgaaaaattatcaaaacgggaaaatatcgagcaatgaaaatgtgccattttatgaagcagagtacaaaatgggaaatagtgatagtaatgtaaaaaaacttagagatgtttatcctatcacaaccagtgaatcgccaactttaaaatttcatatagatggggatataaaaggtagctcgataggatataaaaaagtggaatatatcttttcaaagcaaaaagataaccaaatttctgttagtgattttttaaattttaacccatcaaaagataatcagtagagattcaataaaaaatcagacaagaaagatgtggaataatgagaaatttaaagagagacgtattgtacataagcattatggctttgagtatttttataataggctgtgataaatctagtgttactgctgaaaaagcaaaagaagaccaaatcaaaaagagctttgcgaaaacgttagatatgtatcctattaagaatctcgaggatttatacgacaaagaaggatatcgagatggtgagtttgaaaaaggcgataaagggacttggacgatgtatacagatttcgccaaaagtaataaaccgggtgagctaagtaatgaaggcatgttcttgagcttagatagaaacacacgtacagctaaggggtactactttgtcaggacgttttatcgcaagtataaattaccttatagaaaaaattataaagttaaaatgaaaaataataaaatcattttattggataaagtagaagataaaaagcttaaacaaaaaatagaaaattttaagttttttggacaatatgcaaatcttaaagaattgaaaaactacagcaatggtgatgtctcaattaatgagaatgttccaagttatgacgtgaaatataaaatgagtaataaagatgaaaatgttaagcaattaagaagtcgttataatattcctactgataaatcaccggtattaaaaatgcatattgatggtaatttgaaaggaagttccgttggagataggaagttagaaattgatttttcaaaacgcgaaaatagccatttatcagtaatagattctttggattaccagccagcgaaaactaataaagatgacaaatgataaggatggtgtgaaacaatgaggtctataaaaaggatcagattgtgcataatcctgttgattctaatcatttttgtaacatcttgcggtggtggtaataagatcatgggagattcaaaagaagaacaaatcaaaaagagctttgcgaaaacgttagatatgtatccaattaagaatctcgaggatttatacgacaaagaaggatatcgagatggagaatttaaaaaagatgataaagggacttggctaattagatctgaaatgaaaatccaattaaaaggagaaaacctggaatctaggggagtagttttagaaattaacagaaatactagaacggctaaagggaattatattgttagagaagttgttgaagatagcgatggaatgacacacaatcatacaaaaatgtatcctgtaaaaatggaaaagaataaaatcattccattaaaaccaatcgatgacgaaaaagtaaaaaaagaaattgaagaatttaaattctttgtgcaatacgggaatttcaaagaattggaaaactataaagatggtgaagtgtcatataacccagaagtaccaatatactctgctcaatatcaattgaaaaacagtgattacaatgttgaacaattaaggaagcgatataatatcccgacgaaaaaagcgcctaaattattattgaaagggtcaggtaatctaaaaggctcatcagttggatataaaaatattgaatttacctttgttgaaaataagggagaaaatatttacttcacagatagtgtctactttaatccaagcgaggataaataaatataattactaatataaaaaataacgttagaacatttaataataaagttaaatgaattacatgtattaaattgaataagttagttttgtttgataacataaaagttgaataatcactattttaataagttgtatgaaatattcaaatgtttataaaattaaaacagagagatgtgaaatgatggagtatataaaaaaaattgctttgtacatgagtgtattacttttaatcatttttattgggggatgtggaaatatgaaagatgaacagaaaaaagaggaacaaacgaataaaacagattcaaaagaagagcaaatcaaaaagagttttgcgaaaacgttagatatgtatccaattaagaatctcgaggatctatatgacaaagaaggatatcgagatggtgagtttaaaaaaggcgataaaggtacgtggacgatatcaacagattttgctaaaagcaacaaaccgggtgaaatggatagtgaaggtatggtactgcatttgaatagaaatacgaggacggcaactgggtattatactataagaacaacttatgatgaagtgggtaagatgacacgcgaaaaaaattatcgtgttgaacttaaaaataataagatagtacttttagataaagtagaagatgaaaaccttaaacataaaatagagaattttaaatttttcgggcaatatgccgattttaaagacttgaaaaattataaaaatggaagaataaccatcaatgaaaatgttccatattatgaggcagagtacaaaattaataatagtgatggaaatgtaaaaaaacttagagaaaattacccaattacagccaaaaagtctccgatattaaaactgcatatagacggagatattaaaggtagctcagttggatataaacagatagaatacaagttttctaaggataaagaggatgagacttttatgagtgattttctaaatttcggaccaactaaaggtggaaataatgactaaacaatttgaagtggattatggcaaactaaatagtgaaacagaagcaacgagtgctgtttcaaaattagcttatgaggttgaaaatgcaaataataataaaatatcaaatcgagaattgaaaacaaaatttgaagtattaaaaaaacggggaaaattcccttctaatcttgagtatatagatagtcacacagataaaaaacacggtgtgacagcatcagctttcctaaacaaagatactgggaaagtgattattggcatgactggtacaaatttcaaaaaggaagctcttgcgaagcaacttttgctaccagattttgcaacaacaaaacaggatagaattgactcagctgagactaaaaaggatttaatttccgatgcccaaattggaacattccctccttctgataacagtaaacattttgaagaaacacaagagttcatcaaaaaaataaaaaataagtatgatattgattttataactgggcattcattaggtggtagagaagcggtaatattaggaatgagtaatggtattccgaatattgttgtttataatccagctcctatagcagctaggtatttaaatcataactcccgattatttaaactatataaaggttataaaggtaacattactagaattgtatctgataaggattggttaactaatattataaagggatatacgaattatacttatttcggtaatgaaattgtggttcataacggcaagtcacatgatatggctggatttttaactgaacaagaacaaaaagctataaaaaaagaacttaaaaaagtacaaggttatgtagaagaaaataataagtcgttcgtaaaaaattctaataatgctatgtctaaattagctagtatagaattacttagagccaatatgatgactacaaatggtggttggttatcttcttcgcaacagaaagttttagaaagtttaacagctttaacaattgcgcagtcattcaatcaactgatagaggacgaaattaatcaaatcaaaaaaatgtataatgaaaagaaaaagaaatttgaaaaaaattgggaagacgcgcaaaaagctggaaacgctgtaggtaaagatataaccgtgaatgaagtgctagaagctttagatgaaggtcatgtgaatgaaagtagtatggtaggggaacctaaacaaatgatatctgcaaaagaaaaacaactttcaacaataggttcatctatatcaaattatattacaagagttagatctagtattaatgaaatcgttgataaagatcaagcacttgcatcgcaaataggtggattactatgatgtttaatcaaattaataataaaaatgaattagaagtatcatataattctgagaaaaaacgtatagagaatgaactgcaaaatttgaatgaacttagatacagaactcgaaaagaaaatgaacgtagttatgatgtttttcaatatttgaaacacgaaatgaattatagtgaagatgcccaaaggaaaatgacgagaaatatagaagcgtatgagcaagaaatcaatgagataattagaaagcaagaatggaaattagaagaatataaagaagacttaaaaaaatcttatgaaaagcagttagataaactaagtgattgataatttggaggagattaaatgagtccaatgataggaccagttataggaccggatatagtaccggatatagtaccggatataaagtcaatgataaagaatgctcaaaaagaaaatattcgcacagttattgcacctgaacataagcataaatacaaagatattgaaaacggattaaaaggtgaagaaaaagtattaattgaacaaatggcacagcattgcgaggcttttaaagctaattttaaaggcgcagctcaaggagattgggttaaaagtgctatgtctgagattgacagcattaaggatgacctgaaaaaaattaatagctgagcgacatatcgtattaataaataaagctcccttcaaaattttcattttttcaatgtctactttggagggagcgcttcagtatattcacaactgacactaggccgcttctttttattttattcccatgtgaagtaattcgaactgaatcgaaatatcacactcacaaatgtaaaaacacaacttaaattactgtcccgcattaaacatatccaaattccaaacagcaacaacaaaatcctcaagtaccaaaagctatgatcactttatcaaaatcaacgcaagttaacctctctggaactacccgccataaatcatcttcaccttataaaccataaagcgctgcagttaagtattgaatggcatagccaattgaaatgaaaatagcaatcgttataatggcactaccaattgtatataaagtatgtttcgtagataaaccttccgtcttagaaccaaaaacacttagtagaataaatgcaatgccaatgatatataaaactaaaatgacaaataacatgtttatacacctcgattctctttagtgagatatatctttgtctccattataaagtaaagtgctcaataatttaattaagtatactatttttttattatcgaagattgcgaaagatgaaatgctcctatataatgtaaaacggaattattcctatttgcaaatgaacgaaacaaataaattgaagtgagggtatatatatggctaaaattccagttacggtattaagtggttatttaggctcggggaagacaacgttgttaaatcatattttacaaaatcgagaaggtcgacgtatcgcggtaattgtaaatgatatgagtgaagtaaatatcgataaagatcttgtcgcagatggtgggggactatcgcgtacagatgaaaaattagtcgaactttctaatggttgtatctgttgtacacttagagacgatttattaaaagaagttgagcgtttagtgaaaaaaggtggcatcgatcaaattgttattgagtcaacagggatttcagagccagtacctgttgcacaaactttctcatatattgatgatgaacttggcattgatcttacagcgatttgccttttagatacaatggttacagttgtggatgctaaccgcttcgtacatgacatcaactcagaagatttattgatggatcgtgatcaaagcgttgatgaaacagatgaacgttcgattgctgatttattaattgaccaagttgaattttgtgatgtattgattattaataaaattgatttaattagtgaagaagaacttgcaaagttagaaaaagtgttaagcgcattgcaacctactgctaaaattattaagacaacaaattctgaagtagatttaaaagaagtcttaaatacgcagcgttttgattttgaaaaagcgagcgagtcagcaggatggatcaaagaacttgagtctggtggtcatgcatcgcatacgcctgaaacagaagaatatggcatatcatcatttgtatataaacgtcgtctacctttccatgctaaaaggttcaatgattggttagaaagcatgccaaataatgtcgttcgatcaaaaggtatcgtatggttagcacaatacaatcatgtagcatgtttattatctcaagcagggtcatcttgcaatattcatccagttacatattgggtggctagtatgtctgaagcgcaacaaacacaaatattagcagaacgtcaagatgtcgcagctgaatgggatccagaatatggcgatcgtcatacacaatttgtcattattggtacagaattagatgaagaaaaattaacaaaagaactcgacgcatgcttagtcaatgcgcaagaaattgatgcagattggcaacaatttgaagatccatatcaatggcaaattagaccagcacgataagttgaatgaagtataatcatttttgaattgtggcttaattgtttgcaatttatgacaattaataaaaagttaaggtgttcttaggatctttttgttttcaatctatctaaagtgtgatagctttgataaagcagaaatttgcattttatccatagggctaggacatgtatgtgtcttagtcctttttatatttgcgttgatgaaaatgataaaaccatcgtaccaactgtcaaatgaaggtacaatcattgtttaacgttcataaaaatgagtgaagtaaatgtagctatcaatgtactattaccgcttacagtcacacgagtgtttcagtctaaacgtgcaacgcaattctgcacgtggccaatatatcttgtgctagatcaagaagatcatgaagatttcgcatgccaattcatgaatgtctcagacctcgtgtatcaaacataaaacacgccacaaaaatataacgcgtcagactacaaagatcacgaatattccgtacgtcccactaagaacatcctatacaaaaaacaccaagaccaattatttgcaacaaactaacaagacttacctcacatcaataaatcaacacaaagcaaagccaccatccctattggtatagtggcctgagaattttaagtattcaattcgcttaaattattttgcgaaaatgtcgataattgctttgatgattttaatgatagtacctacaatagccatcgttttgtcctcctgtatgttgatttaacatagtgatgagttgttgatcgttaatgtttgagattagttgttacctaaaaatttaccaagtaaatctttaaagaatttgaataattttgctacgaattccatgtgaatggcccccttcaaataagatgttcatatctatgagatttttataacttacttaccagtgaatttctcaattaatcctttaatgaatttaatgattcctgcaatgatacccatgtgaaagacctcctttgtttgttatgaaatcttatttaccagtgaattgttcgattaagcttttgataactttaatgatgccagcgatgatacccattaagattacctcctttgcttatgagttaacttcattgtacatagttatcttgtgcgtaattgatttttttcctaacttgaattgttatgatcataactgcgaattttttattttaaaaggacgggaaatactgcctaactgtacaggtgcatttacaaaatctttacaatcattggtttaatagaggttaagctcatgaatttgacatgaagcagaaatttaattatattttatgttataagtttaaaacgaataacacgttaggtctcgtctaggcaaagcatatttatgaagatgaattgaacagacagaagtaacattttatatacatatgtgcatgggagcacgcttaaagagaacaatgcaacaaggtatatcaacgtaccgtgatgcagtgtctagttaaactgaaacctgcaatagtaaattttctgccattatgtacagaatctactattgtaggtttttatttttatacataatcaattatgcgagagattagaaataaggaggttatgcagtgttaagttttcaattgctattttcactgtttgttattgcgcttatcattgcattgataagtggcttgttgtttttagcaccagttatgccaatgagatatattaaattacatttatacatactagtcatgccagtattatttgcagtcattggctttttcggtattcatggtcaacatgtcttaggtccatttaaaatagatcgtttatcttggttattagctggctttgtaatggcgcttggttttattattcaaaagttttcaatgcgatatttactaggtgatcatcattatagacattactttccattgttcactgcgattacgtcgtttgcatctttagcatggatgtctgaagacttaagactgatggcactctgctggggtatgacattattatgtttaacactgctgatgaacgttaatcgtttttggaaagtgccacgtgagtctgcgaaattatcaagcatgacatttttatgtggttggcttgcattcgttggagcaattgtaactatttatattgcgactggcgagtggcgcgtgcctcaacatatgtctaattcgacatggtcattgttgacgaatgtactacttgtattagctgtcatgataccagcagcacaatttccatttcatcgatggttgattgaatctgtaacagcaccaacgccagtatcggcaattatgcatgcaggaattgtgaatgcaggtggtgttattctaactcgttttgcgccgatatttgataatggatttgcgttatcattattacttatcctttctagtatttctgtattgttaggatcgggtattagcttggttcaagtggattacaaaagacagttagtcggctctacgatgagtcaaatgggctttatgttagttcagtgtgcgctaggtgtctattcagcagcgattattcatttaatattgcacggtatttttaaagcaacattatttttacaatcaggttctatcgtgaagcgattcaatattccaaaacaagcatctgctaaagacgcttatggctggattgtcatgggacgtgtattagctattatcgtggcatttctgttttggatgagtagtgacagaagtgcatatgaagtgttaagtgcactcattctagcatggtcattacttgtatcttggaatcaaatggtagcctttagtaaagggcgtatggcacgtctggttggcatgattttgatttcaattgtgacatttatctacatcatcacacataattatttttacgatgtattacaaaatataacaacatatgcgacaacaccgcctacaattagtgtcatcattagtgttgtcatattaatatttggtagtttattaagtatctgggtagcgcgtcatcgatactctaagacttttgcggtattgtacgtgtggttagttaatctaggtgaagcacgctcgaaagcgatagaaagtcatccgaattatttgaagaagtatttataggaggtgaaaggtatgacaacacagttaaatatcaattcagtcattgaaaatgcgaaacgtgttattacaccattatcaccgatttcgatttttgcagcacgtaacccctgggaaggattagaagcggatacgtttgaagatgtcgcaaaatggttacgtgacgttcgcgatgtggatattttcccaaataaagcattaatagaaagtgctgtggcacgtggtgaattagatgaaagtgtctttaatcaacttgttactgatatgttacttgaacatcactacaatatcccgcaacactacatcaatctttatattgataacattaaaacattaaaagacgtacctgcatcatatatgaatcattcaaatgttgatgttgttgctgatctactattagaaaaatcaaaacgtgatatggctgaatcatatcatcactatgatgtacgtccgatgagtgatgcaataatagatgaacaaggtgagccacttagcgaacaagtgaatcgtcaaatgattaaatggacgaaactttatatcgatcaatttctatcgagttggacaatgccgaagcgtgagcaaagtttttaccatgcatggttgcatttagcgcaacatgaccatagttttactaaagcacagcgccaagtgattaaaggcttacccaatgatcctgaaatgacgatagagtcagtattaacttatttttcaatagatcaggaagactaccaagcttatgttgaaggacatcttttggcgttaccgggttgggcaggtatgttgtattaccgttcacaacagcatcactttgaacaacatttgttaacggattatttggcaattcggttagttgtcgaacaattgctagttggtgatgagtttaagtcagtcactaaagactgtgaaagtagatcggaaaattggtttaagcaaactgttgcatcatggtgttactacagtgatatgcctagcgatgtattactacaacatgacgtcaatgaaattcaaacgtttattcattttgcagcaactatgaataaaaatgtatttaaaaatttatggctaattgcctgggaaatgacatacgaatctcagttaaaacaaaaaattaaagcaggtcatgaaagtgtggcgggcgcattagatgcaaatcaagtaaatgtttcggaaaatgacaacgctaatcagttacattcagtatcgttaaatgatacacaagcagttgatgaaaataatagcgagctaaatcaggtgggcacatcaacgaaagtgcaaattgcattttgtatagatgttcgttcagaaccatttcgtagacatatcgaagcagcaggtccctttgaaacgattggtattgcaggtttctttggattacctattcaaaaagatgccgtagacgaacaattcaaacatgattcattacctgtcatggtaccgccggcatatcgcattaaagaatttgcagaccgctacgatatgaatgtttatcgacaacagcaacagacaatgtcatcgatgttttacacatttaaattgatgaaaaataatgttatgcctagtctgttattgcctgaattaagtgggccatttttaagtttgagtaccattgtcaattcgattatgcctagaaaaagtcgcgcgtctttacaaaaaataaaacaaaaatggttgaaaaagcctgaaacaaagttaacgattgatcgtgagtttgaccgaacatcagacttacctgttggatttactgagcaagagcaaattgatttcgcgttacaagcgttgaaattgatggatttaaccgaagcatttgcgccgttcgttgtgttagcaggtcatgctagtcattctcacaataatccacatcatgcatcacttgaatgtggggcttgtggtggcgcatcaagcggttttaatgctaagttattagcgatgatatgtaatcgtccaaatgtcagacaaggattaaaacaatcaggtgtgtatattccagagacaactgtttttgcggcagcagaacatcatacgtctactgatacgttggcatgggtatatgtgccagacacattatcagctttagctctagatgcatatgaatcattgaatgacgcgatgccgatgatttctgaacaagcgaatcgcgaacgtttggacaaactgccaacgattggtcgtgtgaatcatccagtggaagaagcacagcggtttgcaagtgattggagtgaggtacgtccagaatggggcttggctaaaaatgcatcatttataattggacgacgccaattaacaaaaggcattgatttagaagggcggacatttttacacaattatgattggcgtaaagataaagatggcacattattaaataccatcatttctggtccggcacttgtggcacaatggattaatttacaatattatgcgtcgacagttgcgccgcatttttacggaagtgggaataaagcgacacaaaccgtcacgtcaggtgttggtgtcatgcaaggtaatgcgagtgatctgatgtatggcttatcatggcaatctgttatggctgctgatcgaacgatgtatcattcgccaattcgtttgcttgtcgttattcaggcacccgactatgttgtagctagactactcgcgaataatgagcatttcgctaggaaggtgtctaatcattggctgcgtttaatgagcgttaatgaggaagggcgttttaaaagttggatttaacgatgaaatgttgcgatgctaagtaactaatatatcatcatatctacaatgttctagcttcttaaaatatactaaaaatgataaacttaatgtaatagttgatgtcgtgataacgatacaaagatgaagtaatcaattttaatattattggagttagtgatatgaaaagaacgaaaggtgaaatcgaagctgaaatcagtaaagccattacgcaatgggaaaaagatttccttggcagaggttccttgtcagttaaatcagacattttaagagatatggtgattattagtttacaaggtatcttaacgccagcagaatatcgtgtatgtagtacgaatgaaggattattaaatattaaacgaacacgttctgaattagttgaatccggtgagcaagatttgaatgatatcatttttaaaattacaggtatcaaagtgatgagcttccatagtgatttaagtacagttacaggtgaacgtattatcgtattcaaacttgaggataatttggaaaagcatatttaagaaggttaggtatgcttctgctggcttattaaagctatagaagtatgtttggttaaacagcgcaacgccatatatttgggtgtgctgtttttctattatatgatgtgtttattacgtggatgaatgcgtgggtctgaatatagcccgtgaaaggcgtatgtcataaaatttgcgaatggtgacaagtcgacgcaagcatatttgttgcgagacatgcctactatccttttacataaagagtatatgtgtgacgtaggcatataatcgataaagtattcctaaaaaattaggtataatgaccattgttgcaataagtttttcggccttgaaaccgataacgcatagtataataggaataaaatataatacaaatatccagtaaatcaaatttgaaaacgatggatgaataggggtaaagaatctaactaatgtaatgattaacgctatatagacaaaaataactctattgatacgccttaccccctctgtataataaatatagatcgtactaaattgaaaatagcaaaatattgttatttcaattatacaatgttttatttgcaatatacataacaatatgaactttataattttgatattgtcggtaaagtgaaatttgtggcacattgatattatggataacatttgtaaaatgaaaatgatgatacgaggagattgtaagatgatagataaaaaattaacatcaccgaaaatgacagtgcctttatttttaatcgcgctgattgtatttataggtatgttttacagtgtagtgacaaatcaagaatggcttaaaaatatagatatgggatcattaacatggtttacagattatttcggtgagccacaacgtcagtatgttaacaatttgtttaattactatatgacgtttagtgcggaaattggagatgtcaaaggtgtcgtgttgatttccattatcgtcacaatcatactgtttattaaacagaggcatttagcggtttggtttgtgacatatttggtttcaggtgtcatcatgaacaaattaattaaagatactgtattacgtccaagaccatataatcatttagccgttgatacaggcttttcatttccaagtggacattccaacgccagcacattattatatttcgccttaatgatcataattatttcacttgctgctaagacaataacaaaagtgttgagtgcgctagttatgggaatattatggcttagcatattattttgtcgcctttattttcatgcgcattacttttcagatgtcattggcggcacgtcactagcaatcatttgggtagcgttattcttaatggtatacccatactttattaatcatcgacgacaacgcgtttagcaaacatctttagacatagtggaggtatatagaaaaatgagaattaaaacaccgagtccatcttatttaaaaggtacaaatggacatgcgatattattattacattcatttacaggtacaaatcgggatgtgaagcatcttgcagctgagttaaatgcacaaggattcagttgttatgcaccgaattatccaggtcatggtttattgttgaaagatttcatgacatataatgtagatgattggtgggaagaagttgagaaagcttaccaatttttagtcaatgaaggttatgaatctatcagtgcaactggtgtgtctttaggtggattaatgacattaaaattggcgcaacactatcctttgaaacgtatcgctgtcatgtcagcaccaaaggaaaagagtgacgatggtttaatagaacatttagtttattatagtcaacgcatgtcggatattttaaatttagatcagcaagcatcgagtgcgcaattagcagcaattgatgattatgaaggtgaaattacgaagtttcaacattttattgatgatatcatgacaaatttaaatgttattaaaatgccagctaatatattatttggtggtaaagatgcgccatcctatgaaacaagtgcacattttatttatgaacatttaggatcagtagacaaagaattaaatggtctgaaggattcgcatcatttaatgacgcatggagaaggcagagatattttagaagaaaatgttattcgctttttcaatgctttaacataattgaagattttaaaaattaacacttgagtgacgatgttattatatttgtcatttgagtgttttttgtggcgtgatagtatagggaacttagctaaagttaatttgtagtgtgatgtcgtggaaatattatggagttataccagaagttgatttgtattgtaatgtcgtggaaatattatggagttataccagaagttgatttgtattgtaatgtcgtggaaattttatgggcattgcacctgaagttgttatgtggcgagatgttggggatatagatggtgttgtatgtggtgagatgttggcgcacgtatacagcgttgaaccagaaattttaatgtagcgtaatgacaacacattacaagagttgactatattatgataaatacaggcgctaccgtattaatgaaacaattttgatgcaggtgtattgcatgttatttacatacatgttagagtgttacttaaacacgtagacgctttaacgctttaaaggagatgtgaatgatgaaaagacaacaatcacaatggaagtcatcaactggatttattttagctagtgcgggttctgcaatcggtcttggtgccatgtggaaattcccatatatggcagggatttatggcggcggtgcctttctagctatgttcttaatattcaccatttttgttgggttgccattactcattatggaattcactgttgggaaaatgggacggacatatacaacacaaatatatagtaaattaactggtaaaaaatggctcaatatcattggctggaacggtaatttggcagtgtttattttatttggcttctatagtgttatcggtggttggattgtcatttacatcggacaagttttatggcaattagttatatttcaacgcatcaatcatctccaagaaatgaattttgaagcggtaatatcaaatccttggttaaccgttctagggcaaggtatattcatattcgctacgatgattattgtcatgttaggtgttgaaaaaggattagaaaaggcatcaaaagttatgatgccattgctgtttgtctttttaatcatcattgtgattaagtctttaacattagatggtgccttagaaggtgtgaaatttattttacaaccaagagtatcagagattactgctgacggtatcttgtttgcgctaggccaatcattctttacgttatcattaggaactacaggtatgattacttatgcgagttatgcctctaaagacatgacgattaagtcatcagctatttctatcgttgttatgaatatctttgtatctgtattggcaggtctagctatatttccggcgttacatagttttggctatgaaccacaagaagggcctggattattatttaaagtactaccaatggtctttagtcaaatgcatctaggcacattattctatttgggattcttagtgctgttcttatttgcggctttaacgtcatctatttctttattagaattaaatgtttctaacttcacgaagaatgacaatacaaaacgtaaaaaagtcgcagtgattggtagtattttagtatttatcattagtattccagcaaccttatcttttggtatcttaaaagatgtaagattcggtgcgggaacgatttttgataatatggatttcatcgtttcgaatgtattgatgccattaggcgcattaggtactacgcttgtcgtaggacaattattagataaaaaattattacaacaatattttggtaaagatcgatttagattattcagtggttggtattacttaattaagtatgcgatgcctgccgttattattttagtctttatcgtgcaattatttagttaatatatagaagcatctgacacacaagtatttgtgttgctcaggtgtttttttgtttggaattgaaaatttagtactggttctgaattaatcgaaacttagataattgcaaaataacaaaatgtcgtttataattcttatctgaaaagtaagaattaaaattgagacatgaagaaaggtttcattcatttgatcggcatgtcagatgagggtgcatctatgattacttatgatttaattggcaatacaccattagtactgttagaacattatagtgatgataaagttaaaatttatgccaagcttgaacaatggaatcctggaggcagtgttaaagacagactcgggaaatatttagtagagaaggcaattcaagaagggcgtgtgcgtgcaggtcaaactattgttgaagcgactgctggtaatacaggcatagggttagctattgcagcgaatagacatcatttgaaatgtaagatctttgcgccgtatggtttttcagaagaaaagattaatattatgatagcgcttggtgcagatgtttcaaggacgagtcagtctgaaggtatgcacggggcacaattagctgcacgttcctatgctgaaaaatatggtgccgtttatatgaatcaatttgaatccgaacataatccggatacatattttcatacattgggacccgaattgacttcagcattacagcaaattgattattttgtggctggtattggctctggcggtacatttacaggtaccgcacgttatttaaagcaacatcacgtgcaatgttttgccgttgagccagaagggtccgtgttaaatggagggccagctcatgcacatgacactgaaggtatcggttctgagaaatggccgatatttttagagagacgtcttgtagatgggatatttacgattaaagatcaagatgcctttcgaaatgtcaaaagtttggctataaatgaagggttgttagtaggcagttcttcaggtgcagcattacaaggtgcattgaatttaaaagcgcaactaactgaaggtacgattgttgtcgtatttccagatggtagcgatcgatatatgtctaagcaaatatttaattatgaggagaatgattatgaataagaaaactaaattaattcacggtggacacacaacggacgactatacaggtgcagttactacaccaatttatcaaacaagtacatatttacaagatgatattggtgatttacgtcaaggatatgaatattctcgtactgcgaatccaacaagaagttctgtagaaagcgttattgcggcattagaaaatggccaacatggctttgcatttagttcaggtgttgcagcaatcagtgcagttgttatgctgttggacaaaggtgatcatattattttaaattcagatgtatacggcggtacttatcgcgcattgacaaaagtatttacacgatttggcattgaagtggattttgtagatacaactcatacagattcaattgtacaagcgatacgcccaacaacaaagatgttgtttattgaaacaccttctaatccattattacgtgttactgacattaaaaagtctgctgaaattgcgaaagaacacggtttgatttcagtcgttgataacacatttatgacaccttattatcagaatccattagatttaggcatcgatattgtcttgcattctgcaacgaaatatttaggtggacatagtgatgtcgttgctggtttagttgcaacatcggatgacaagcttgcagaacgtttagcatttatttcaaattcaacaggtggcattttaggacctcaagatagctatttacttgtgaggggtattaaaacattaggtttacgtatggaacaaattaatcgcagtgttattgaaattattaaaatgttacaagcacatccagctgtgcaacaagtgttccatccaagtattgaaagtcatttaaatcatgatgtccatatggctcaagcggatggccatacaggtgtgattgcatttgaagtgaaaaatacagaaagtgccaaacaattgattaaagcaacatcgtattacacattagctgaaagtttaggtgcagtggaaagtttaatttcagtacctgcattgatgacacatgcatccattccagcagatattcgagctaaagaaggtattacagacggacttgtaagaatttctgtaggtattgaagatactgaagatttagtcgatgatttaaaacaagcactagatacgttataaataatagcagcactagcatatattttgagttcaacttaaattgattttgaaaatgctagtgcttttttgtgcgatgttaatatttagtaattgcgttgtggaggattgttagacatttttattcatttaattcgataaatgtcatagtagtctcacaattcgtcattgtctcatgaattacttattttttaattttttagaaaattcggcaaattgtattgacgatatatgcaattttacatataatgctcttattcctagtggattaataagaatttgtaggagggggctttgcatgattgagtttcgacaagttagtaaatcatttcataagaaaaagcaaacaatagatgctttgaaggacgtatcatttacggtcaatcgcaatgatatttttggtgtgattggatatagtggtgcaggaaaaagtacgttggtaagactcgtgaatcatcttgaagctgcctcgaatggacaagtgattgtagatggacatgatattacgaattatagcgataaaatgatgagggatattaagaaagatatcggtatgatatttcagcatttcaatttattaaattcagctacggtatttaaaaatgtagcaatgccactcattttaagtaagaaaagcaaaacagaaattaagcaacgagtaacagaaatgcttgaatttgtaggattgagtgataaaaaagaccaatttcctgatgaattatctggtgggcagaagcaaagggtggctattgcaagagcgcttgttactaatccgaaaatactcctatgcgatgaagcaacaagcgcattggatccagcaacgactgcttcgatattgacgttattaaagaatgtcaatcaaacctttggcattacaattatgatgattacacatgaaatgcgcgttattaaagacatttgtaatcgtgttgctgtaatggaaaaggggcaagtggttgaaacaggaactgttaaagaggtgtttagtcatcctaaaacgacgattgctcaaaattttgtgtctacagttatacagactgagccaagtacatcattgattcgtcgattgaatgacgaacaagttggcgattttaaagattataaaatcttcgtcgaggaaactcaggtgacacaaccgattataaatgacttgattcaaatttgtggcagagaggttaaaattttattttcatctatgtcagaaatacaaggtaacaccgtatgttatatgtggcttcgatttaatatagatcaacaatttgatgacacggcaataaatcaatatttcaaagagaaaaatattcaatttgaggaggtgcattaacatatgtttggttctgatttagacagtgcacagttattacaagcattgtacgaaacgttatatatggtatctattgctttatttttaggagcagtgattggtattccattaggtgtcttattggtaattactcgaaaacaaggcatatggcccaatatagtgatacatcaagttttaaatcctttaatcaatattttaaggtcactaccatttattattttgttaattgcgattgtgccattcacaaaattagtagtaggtacttcaattggtacgactgctgccatcgtgcctttaacagtatatgtggcaccttacattgcaagacttgttgaaaactcattattggaagtagacgaggggattattgaagcggcgaaagcgatgggcgcttcaccactacaaatcattagatattttttaattcctgaagcgttaggttcattagtattagcaattaccactgcgattattggacttattggaagtacggcgatggcaggagctgttggcggtggtggtataggagacttagctttagtgtatggttatcaaagatttgatacgacggtcattattattaccgttattgtattagtcattattgtccaagtgattcaaacgctagggaatgtcctagctagattcatacgtagacattaatgatatatagtgaagattttgaaaggaattgatagaatgaaaagattgattgggttagttatcgtagcacttgtattattagcagcgtgtggtagtaacaatgataaaaaagtaacaattggtgtcgcatcaaatgacactaaggcttgggagaaggttaaagaattagctaaaaaagatgatattgatgtggagattaagcacttttccgattacaatttaccgaataaagcattaaacgatggtgatattgatatgaatgcattccaacattttgcatttttagatcagtataagaaggcacataaaggaacaaagatttcagcattaagtacaacagttttagcaccgttgggcatttactcagataaaattaaagatatcaaaaaggttaaagatggtgctaaagttgtcattccaaatgatgtatcaaaccaagcacgtgctcttaaactattagaagcagctggtttaataaaactgaaaaaagatttcggtttggcaggcacggtgaaagatataacgtcaaatccaaaacatttaaaaattactgcagtagatgcacagcaaactgcgcgtgctttatctgatgtcgatattgcagttattaataacggtgtagcaactaaagcggggaaagaccctaaaaatgatccgatatttttagaaaaatcaaattcagatgctgtaaagccatatattaatattgttgcagttaatgacaaagacttggataacaaaacatatgctaaaatcgtagaattgtatcattcaaaagaagctcaaaaagcgttgcaggaagatgtcaaagatggagagaaacctgttaatttatctaaagatgagattaaggcaatagaaacgtcattagcaaaataaattatattgcgtcctacaagcaaagttcatgcttatgtttgtagggcgttattgttggagaataaaattatttccaatagagaaagggattgtaatcattttatagtgaaatattatgaaattgtaataatttagatattgtaaaatctaataagttgtaataattttaaggggtaattataaaatttgatgatacagtatatgatttttttgtaatcataatgtcatcaaacatcaacctattatacataataaaatcgtataatgatgtagtattcataaattcggataaaagaatgttaggaaagttaagcaagaggaggattttaaagtgcaaaaaaaagtaattgcagctattattgggacaagcgcgattagcgctgttgcggcaactcaagcaaatgcggctacaactcacacagtaaaaccgggtgaatcagtgtgggcaatttcaaataagtatgggatttcgattgctaaattaaagtcattaaacaatttaacatctaatctaattttcccaaaccaagtactaaaagtatctggctcaagtaattctacgagtaatagtagccgtccatcaacgaactcaggtggcggatcatactacacagtacaagcaggcgactcattatcattaatcgcatcaaaatatggtacaacttaccaaaacattatgcgacttaatggtttaaataatttctttatttatccaggtcaaaaattaaaagtatcaggtactgctagctcaagtaacgctgcgagcaatagtagccgtccatcaacgaactcaggcggtggatcatactacacagtacaagcaggtgactcattgtcattaatcgcatcaaaatatggtacaacttatcaaaaaattatgagcttaaatggcttaaataatttctttatttatccgggtcaaaaattgaaagtaactggtaatgcatctacgaactcaggatctgcaacaacgacaaatagaggttacaatacaccagtattcagtcaccaaaacttatatacatggggtcaatgtacatatcatgtatttaatcgtcgtgctgaaattggtaaaggtattagtacttattggtggaatgctaataactgggataacgcagcggcagcagatggttacactatcgacaatagacctactgtaggttctatcgctcaaacagatgtaggttactatggtcatgttatgtttgtagaacgtgtaaataacgatggtagtattttagtttcagaaatgaactattcagctgcaccaggtattttaacttacagaacggtaccagcttaccaagtaaataattatagatatattcactaaagtcttacgtatataaatatataatgaattcctattacatttcacaagctgaaaagttggattgaatcctaaactttatggcggggctatcaaagtcgtgattgttgtaataggaatttttgtataagaaaaaggattggtcgaatgaacttcatgttctatgttcgaccaatccttttctgaattagtattcatgctttactttgcgaatgcttgtaaataatctagcaccgtttgttattaaagtaacaactgccactgcttttttgaacttacgtggtgacttaattgaaatgtaaaagtctaacacggttcctacagtgcttaaacctaatgaaagatatactaattttttatttttagcatgatatttatagccattgtagccgtcgactatgaaacctgcgacatttagtaaacttgataaacgttgtgatttggaacgttttgccataataataattccccctagtatcttctgtttatatgaaaaattgggtgcgctgaattgctaacgttttgcgctataactactcatatatgataacataattgtacagtataatttgaaaaattgatttcacaaagttggggtgtcaaagatgattaaatgtgtctgtttagttgaagaaacagctgataaaatattacttgttcaagtaaggaatcgcgaaaagtattatttcccaggtggtaaaatagaagaaggggaatcacgagtacaagcgctgttaagagaagtaaaagaagaattaaatttaacattaacaatggatgaaattgaatatatcgggacaattgtaggtcctgcatatccacaacaggatatgttaactgagttaaatggatttcgcgcattaaccaaaatcgattgggaaaacgtaactatcaataatgaaattacggatatacgctggattgataaagataatgatgcgttgattgcgcctgctgtcaaagtttggattgaaacgtatggtggtaaacatgacaaataatgacaccatcatgttacgacattatgtcccacaagattattcgatgttagaagcttttcaattaagtgaaagtgatttgaagtttgttaaaacgccagaggaaaatattacagctgcaatgtctgataatgaaaggtatcccatcgttgtaatggatggcaggcaatgtgtggccttttttacattacatcgtggaaaaggggtcgcaccatttagcgataaccaagatgcagtatttttcaggtcatttagtgttgatcaacgttatcgtaatagaggaataggtaaagtggtaatggaaaaattggcgtcatttatcacttcaacatttcaggatattaatgagattgtgttaacggttaatactgacaatccacatgccatggcactttatcgccaacaaggatatcaatatatgggagatagtatgttcatcggaagacctgttcatattatggcgttaactataaaataaattaaatttaaaagcatctttactcatcgtcgaccacaacaattaatgatgaataaaggtgctttttgttatagatcaccggacaatttaatatagtaaaaagcgacctagtgaacaattgacatatatccacaggtcgcttaacttaagttatattgctagttgcgattaattgatagactcatcatttttgcgctgtcgagatggtctttttattaaaaatgccgtaatccaagccgtaatcggaatactgattgcaacggcaataccgcctaaaataatagaaataaattcttgggcaaatattttcgagtttataatatgaccaaatgaatatttaagtttgaaaaaccaaataaataaagcaagttggccaccaaaaaaggcaaggtaaatcgtgttcgcagatgtcgctaaaatttctctaccaacacgcatgccagattggaataattcgtattgcgtaagtgttggatttacttgatgcaattcataaatgggtgaactaatggtaatcgttaaatctatcacagctgcaataacagcaagaataatagtgaacaccataaattgaaccatatcaatgccaatattcattgaatacacatatgtttcatcttgttgttcggttgaaaagccttgtagatgaccgaagtagacagataaataaatgagtgtaatcaacaatattgttgtaacgatagtgctgataaatgcagcttgtgttttaacattgtaactattgagtacgaataaattacaagcgccaataataatgcagaaaaagaatgtgacgacataaatcggtacgccaaaaataatcaatacaatactaataattaaaatagcgaaatttaaaaatagggttaaataagagatgaatccctttttacctccgaaaattatcatcagaaagaggagcaataacgccaatataaatacagcattcattgtttcgccctccttaatgtttcaaatacttccataaacaatattgtgataggaattgtaagtacgatacctataccgcctgttagtgcgcgcgcaatttctaacgaccaattcatcgaaatagtataagtcacagtatttgcattttttaaaaagattaaaaacataggtagtgcaccggataaatatgagaataataagatgttagtcattgttcccataatatcttggccgatgtttcgcccagcaagcgcccatctcctcattgaaatgtgtggcgtacgctgtaaaatttcatgcataccactagcaattgtaattgcaacatccataatagcgccaagtgaacctattaacactgaggctaggaagatatctttcggtggtaatgataaaaagttcatcgtttcatatttaatgcctttaccatctgtcatatatatgattaattctgttaaacctatactcaaaaaagttccgataattgtactggctatggtaatgagtgtacgcatatgccagcctgtaacgagcaataaagtgagtattgttgaacagatcatggcaatggtcatgagtaagaataaattaatattgctatgttgaatatgaatgtaaattgcgattaatatggcaatagaattcaagattaacgataaaatcgattgcagtccgactttgcgaccaaccaataatacagttaataagaacaaaccagtgatgataaccgttaaggtatcacgcttcttttctataatataagcatcactcggcttgttagaaatatgtaataatactttttcgtgtgtgcgaaatgcctcagaatctgcttgcgatttgacgtactgatgattaatcgtcgtcgtttctccagcaaattgaccatttaatattttgacttttaattgatttttatatttaatatcacgattattttgtgcatcttttgtaggtgtcgaagaaacatgtttgacatctataatttgaccaattggtttgttgtaaaagttctcattattgaatgtaaataaaatagcaccaatgaatgcgatgcagaacaaacctaaaattatattaaatggctttgtaaataaatttctatatttcaaaaacaaaaccccaattctatgaatgaattaatatggtgattatacgcccttaattttttattttcaaagatattactgctaagtgtaaaacgaaaatcatcattgataaagtcgaattacttaatggaatgtagacgttttagtcattaattgctgaataagtgttaataagataccaatatcactctttgtataaggctcctttgtaatagcacatatcgttctttttaattcagtatgatctaattttatatctatccatgatttagattctggtaaatgtatattttgtgatgaaatgatataaccttctttttgacgaaggagatactgcgcaagtggttggctactgattgtgtatacatctgatttagtaatcttgcgcaattgtttttttacagtttcggcaaatggtgccaagcaataaatatgactatgctcaaactgaattaatggtgggtgtgtcgccatcgtaattggatcgtctgaaggcgcatataaatgatagtgctcttcgaataaaggtagcatatgtaattgtttgtgtttacgtatttctggtgtaagttccgtgaaaccaatgtctatattcccatttaatacgctatttataattgtgtcatgttctaataagctcggtatgacatgtgtatcattttgtaaatgaaacgtttggataagtggtagtaacatgtgggatgcgtcactctcatcatagccaatgtagatacttttatttttagttaatccatggctttgaaattgttcaatcgtgctatctaaatgttcaataatacgcagagcttcattaaataataatttcccttcagatgtgagcgtaatattgcgtccttgctttttaaataaagacacattaagttcttgttctaataatgtaatttgacggcttatcgctgattgagcaatgtttagttcaagtgctgtttcggagatatgttctcttttagcgacctcgataaaatatcttaattgtttaatttccatagcgatataggcacctccaaaaatgagtgttttgtaactattatagcaatattattgataaatgttctattttttagatgaatatcttctattttatatattgaacagataaattttttagattatagtaattatcattaataactaatatcagaatattctaaaaaaaggggtgtgcatcatgcacaatgagaaattaattaaaggcttatatgactatcgtgaggaacatgatgcgtgtggtattggtttttatgcgaatatggataataaaaggtctcacgacatcattgataaatcgcttgaaatgttgcgacgcttagatcacaggggcggggtcggcgcagatggcatcactggtgatggcgcaggtattatgactgaaataccttttgcatttttcaaacaacatgtaacggactttgatatcccaggtgaaggtgaatatgccgtggggttatttttttccaaagaacgcgttttaggttctgaacatgaagcagtttttaaaaaatattttgaaggcgaagggttatcaattcttggttatcgtaatgtaccagttaataaagatgccattgctaaacatgtagcagatacgatgccagtcattcaacaagtgtttattgatattagggacattgaagatgttgaaaagcgtttatttttagcgagaaaacaattagagttctattcgactcagtgcgatttagaattgtattttacgagcttatcacgtaaaacaattgtatataaaggttggttacgatcagaccaaattaaaaaactctatacagatttatcggatgatttatatcaatcaaagctagggttagtgcattcgagatttagtacgaatacattcccgagttggaaaagggcgcatcctaaccgtatgttaatgcataatggtgagattaacacgataaaaggtaatgtgaactggatgcgagcacgccaacataaattaatcgaaacattatttggcgaggatcaacataaagtgtttcaaattgtcgatgaggatggtagtgactctgctattgtagataatgcgctagagttcttatcgttagccatggagcctgaaaaggcagcgatgttactcatacctgaaccttggttatacaatgaagcgaatgatgcaaatgtacgtgcgttttatgaattttatagttatttaatggaaccgtgggatggtcctacaatgatttcgttctgtaacggtgacaaacttggcgcgcttacagatagaaatggattacgtccaggtcgttatacgattactaaagataactttattgtcttttcatctgaagtgggtgttgtggacgtacctgaaagtaatgttgcttttaaaggtcaattgaatcctggaaagttattgcttgttgattttaaacagaataaagtcattgaaaataatgatttaaaaggtgcgattgctggagaattaccatataaagcgtggattgataaccataaagttgactttgattttgaaaatatacaatatcaagattcgcaatggaaagatgagacgttatttaaattacaacgtcaatttgcatacacgaaagaagagattcataagtatattcaggaacttgtagaaggtaagaaggatcctatcggtgcaatgggatatgatgcgccaattgcagtgttgaacgagcgaccagaatcactatttaattactttaaacagctgtttgcacaagttacgaatccaccaattgatgcgtatcgtgaaaaaatcgtaacgagtgaactttcttatttaggtggcgaaggtaacttactagcacctgacgaaacggttttagatcgtattcaattgaaaaggccggtattgaatgaatcacacttagcagcgattgatcaggaacattttaaattaacttatttatcaacggtatatgaaggggatttggaagatgcgttagaagcattaggccgagaagcagtgaatgctgtaaagcaaggcgctcaaattctagtgttagatgatagtggattagttgatagcaatggctttgcaatgccgatgttactcgcaataagtcatgtgcatcaattacttattaaagcagatttacgtatgtctacaagtttagtcgctaaatctggtgagacacgagaagtgcatcatgttgcttgtttactcgcatatggcgcgaatgcaattgtgccatacctagcgcaacgtacagttgaacaactgacattgacagaagggttacaaggcaccgttgtcgataatgttaagacatatacggatgtattgtcagaaggtgtcattaaagtaatggctaagatgggaatttcgacagtgcaaagttatcaaggtgcacaaatatttgaagcgattggcttgtctcatgatgtgattgatcgttattttactggaacacagtctaagttatctggtatttcgattgatcaaattgatgctgaaaataaagcacgtcaacaaagtgatgataattatcttgcatcaggtagtacattccaatggagacaacaaggtcaacatcatgcttttaatccggaatctattttcttattgcagcacgcatgtaaagaaaatgactatgcgcaatttaaagcatactctgaagcggtgaacaaaaatagaacagatcacattagacatttacttgaatttaaagcatgtacaccgattgacatcgaccaagttgaaccggtaagtgacattgtcaaacgctttaatacaggggcgatgagttatggatcgatttcagcggaagcacatgaaacgttagcacaagccatgaaccaattaggtggaaagagtaatagtggtgaaggtggcgaagatgcaaaacgttatgaagtacaagttgatggaagcaacaaagtaagtgcgattaaacaagttgcttctgggcgttttggtgtaactagtgattatttacaacatgccaaagaaattcaaattaaagttgcgcaaggtgcaaagcctggtgaaggtggtcaattacctggtactaaggtatatccgtggattgcgaagacaagagggtcaacgccaggtatcggtctgatttcaccaccgccacatcatgatatttattcaatagaagatttagcgcaactgatacatgatttgaaaaatgcgaataaagatgcagatatcgcggtaaaattagtttcgaaaacaggtgttggtaccattgcatctggggtggcaaaagcatttgcagataaaattgtcatcagtggttacgatggtggtacaggggcttcacctaaaacgagtattcagcatgccggtgttccttgggagattggtttagcagaaacacatcaaacattaaaactaaatgacttaagaagtcgtgttaagttagaaacagacggtaagttattaactggtaaagatgtagcgtacgcatgtgcgcttggagcggaagaatttggatttgcaactgcaccattagtggtgttgggctgtattatgatgcttgtatgccataaagatacatgtccagtaggagttgcaactcaaaacaaagatttacgtgctttatatagaggtaaagcacatcatgttgttaattttatgcattttattgcacaagaattaagagaaattttagcatctttaggtttgaaacgtgtagaagacttagttggaagaactgatttattacaacgatcatcaacattaaaagcgaatagcaaagcggctagtattgatgttgaaaaactgttatgtcctttcgatgggccaaacacaaaagaaattcaacaaaatcataatcttgagcatggatttgatttaacaaatttatatgaagtaacgaagccatatattgctgaaggacgtcgctatacaggtagctttacagtaaataatgaacaacgtgatgtaggagttattacaggtagtgagatttcgaaacaatatggagaagcaggacttcctgaaaatacaattaatgtttatacgaatggtcatgctggtcaaagtcttgcagcatacgcaccgaaaggcttaatgattcatcatactggagatgcgaatgactatgttggtaaaggattatctggtggtacgctcattgtcaaagcaccttttgaagaacgacaaaatgaaattattgctggtaacgtctcattctatggtgcgacaggtggtaaggcatttattaacggtagtgcaggagaaagattctgtattagaaatagtggtgtagatgttgtcgttgaaggtatcggtgaccatggattagagtacatgactggtggacatgtcattaatttaggggatgtaggtaagaacttcggtcaaggtatgagtggtggtattgcttacgttatcccgtctgatgtagaagcttttgttgaaaataatcaactagatacgctttcgtttacaaagattaaacaccaagaagaaaaagcgttcattaagcaaatgctggaagaacatgtgtcacacacgaatagtacgagagcgattcatgtgttaaaacattttgatcgcattgaagatgtcgtcgttaaagttattccaaaagattatcaattaatgatgcaaaaaattcatttgcacaaatcattacatgacaatgaagatgaagcgatgttagctgcattttacgatgacagtaaaacaatcgatgctaaacataaaccagccgttgtgtattaaggaaagggggagatacgatgggtgaatttaaaggatttatgaagtatgacaaacagtacttaggtgaattatcactggtagaccgtttgaagcatcataaagcatatcaacaacgatttactaaagaagatgcctctatccaaggtgcacgatgtatggattgtggaacgccgttttgtcaaaccggacaacagtatggtagggaaacaataggttgtccaattggaaactacattcctgaatggaacgacttagtgtatcatcaagattttaaaactgcttatgaacgcttaagcgaaacaaataactttcctgactttacagggcgtgtatgtcctgcaccatgcgaaagtgcttgtgtgatgaagattaatagagaatcgattgcgattaaaggtattgaacgcacaattattgatgaagcttttgaaaatggttgggtagcaccgaaagttccgagtcgtcgtagagatgaaaaagtggcaatcgttggaagcggtccagcaggattaactgctgctgaagaacttaatctactaggatatcaagtaactatttatgaacgtgctagagaatcaggcggtttattaatgtatggtattccgaatatgaaacttgataaagatgtggttcgacgtcgtattaagttaatggaagaagcgggcattactttcattaatggtgttgaagtaggcgttgatattgataaagcaacgttagaatctgagtatgatgccattatattatgtactggtgcacaaaaaggtagagatttacctttagaaggacgcatgggtgatggtatacatttcgctatggattatttaactgaacaaacgcagctgttaaatggagaaattgatgatataacaataactgcaaaagataagaatgtcattatcattggtgctggtgatacaggggcagactgtgtagcgacagcattaagagaaaattgtaaatcgattgttcaatttaataaatatacgaaattgccagaagcaattacatttacagaaaatgcatcatggcctttagcaatgccggtgtttaaaatgggctatgcgcaccaagagtacgaagctaagtttggtaaggaaccacgtgcatatggtgttcaaacaatgcgttacgatgttgacgataaaggacacatacgtggtttgtatactcaaattttagagcaaggcgaaaatggtatggtcatgaaagaaggacctgaaagattttggcctgctgaccttgtattattatcaatcggcttcgaaggtacagaaccaacagtaccgaatgcttttaacattaaaacggatagaaatcgaatcgtggcggatgatacaaactatcaaactaataatgaaaaggtatttgctgctggagatgctagacgtggtcaaagtttagttgtatgggcaattaaagaaggtagaggcgtagcgaaagcagtagatcagtatttagcgagtaaagtttgtgtataatctttgtatggaaatggtggttacgttgacgttgtgtcatgctgaatcgattttgaaataatctagtatctatcaacgtcacatgccatctttgtaacctaaaaacaaaggtttgtaagacaacaaatagattaattataagtagtgattttttacattcgtttataggtcaactgtagtggaagacaatgatttgtggtaatcatgtaatgcttaaaaacaatattgacttttacagaacgttcatatatgataaatattgtgtttaggaggaatacccaagtccggctgaagggatcggtcttgaaaaccgacaggggcttaacggctcgcgggggttcgaatccctcttcctccgccatcaatatttatattaaatactatatataatgaaggtaagtgctcaaattttgagtatttacctttttatttgtctttgaatgactcgtaatttttgataatagaaatgataaggcattgagattggaagggcatttggcttgtgcaatatacatagctaaatgtcttttttgttttgtgaaatatgatggatggcttgtgtggacaagtttgctatttatagatatgcatttttcaatttaggagttggccatgcatctacactttataatggtgagagcgtggtgaggtattgttaataacgcaattgtagcgaggagttattgctacatatgtcgttatggctcattgattttctgaaatggctaccccagataattgtgacaaaataaaaatattttgttgaaagcctttacataacttgtctagacaagttatactcgttttaagacattaagggagtgaaatatatggctgtaaaaagagaagatgtaaaagccatcgtaaccgctattgggggaaaagaaaatcttgaagctgcaacgcattgtgtaacacgattacgtttagtgctgaaggatgaaagtaaagttgataaagacgcattaagtaataacgcgttggtcaaggggcagtttaaagcagaccatcaatatcaaattgtcattggtccaggaacagtcgatgaagtgtataagcagtttattgatgaaacaggtgctcaagaagcttcgaaagatgaagcgaaacaagcagctgcacaaaaagggaatccagtacaacgtttgatcaaattgttgggggatatttttataccaatattacctgcgattgtgacagctggtttgttaatgggaatcaataatttacttacaatgaaaggtttatttggtccaaaagcacttattgagatgtatccacaaattgctgatatttcaaacatcattaatgtgattgcgagtacggcatttattttcttaccagcattaattggttggagtagtatgcgtgtatttggtggtagtccgattctaggcatagtcttaggtttgattttaatgcatccgcaattagtatctcagtatgatttggcaaaagggaatattccgacgtggaacttatttggcttagagattaagcagttgaattaccaaggtcaagtgttgccagttttaattgcagcttacgttctagctaaaattgaaaaaggattaaataaagtcgttcacgattcgataaaaatgttggtcgttggacccgtagcgcttttagttactggatttttagcatttattatcattggaccagttgcgttattgattggtacaggtattacatctggtgttacatttatattccaacatgcaggatggcttggcggagcaatatatggattgttatatgcaccacttgtaattacaggactacaccatatgtttttagcagtagatttccaattgatgggtagcagcttaggcggtacgtatttatggccaattgttgcgatttccaatatttgtcagggctctgcagcatttggagcatggtttgtctataaacgtcgtaaaatggttaaagaagaaggcttggcattaacatcttgtatttctggtatgttaggtgttactgaaccagccatgttcggtgtgaacttacctctgaaatatccatttatcgctgcgatatcaacgtcttgtgtattgggggcaatcgttggtatgaataacgtacttggaaaagttggtgttggtggcgtgccagcattcatttcaattcaaaaagaattttggccagtatatcttattgtgacagctattgctattgttgtaccatgtatactaacaattgtgatgtctcattttagtaaacaaaaagcgaaagaaattgttgaagattaataaaataaaaaaggggcgttcgttatttggacgtcctttattacgttataaggtggtaattgtgtgtcgaaagaaatagattggagaaaatccgttgtatatcaaatttatcctaagtcgtttaatgatacgacggggaatggtataggagatatcaacggaattatagaaaaattggattatatcaagttattgggtgttgattatatttggttaacaccagtgtatgaatcacctatgaatgataatggctatgatatcagcaattatttagaaatcaatgaagactttggaacgatggatgattttgaaaagttaatcaaagttgctcatcaaaaagacttgaaagtaatgttagatattgtcattaatcatacgtcgacggagcatgaatggtttaaagaagcccgtaaatctaaagataacccttatagagattattactttttcagatcacctgaagacgggccgccaacaaattggcattctaaattcggtggtaatgcatggaagtatgattctgagacagatgaatattatttacatttatttgatgtcagtcaagctgatttaaattgggataatccggaagtacgtcaatcgttatatcgcatagtcaatcattggatagacttcggcgttgatggttttcgatttgatgtcattaacttaatttctaaaggtgaatttaaggactctgacaaaataggtaaagaattttatacggatggtcctagagtgcatgagtttctgcatgaattaaatcgtcaaacgtttggtaacactgacatgatgactgtaggagaaatgtcttcgacgacgattgaaaattgtattaagtatacacaaccagaacgccaagaattgaatagtgtttttaattttcatcatctaaaggttgattatgttgatggtgaaaagtggacaaatgcgaagcttgatttccataagttaaagaaaattctgatgcaatggcaacgaggtatttatgacggtggcggatggaacgcgattttctggtgtaatcatgatcagccacgggtagtgtctagatttggtgatgatacgtcggaagagatgaggatacaaagtgctaaaatgttagctatcgcactgcatatgttgcaagggacgccatatatttaccaaggtgaagaaattggtatgacggacccacattttacatcaatagcacaatatcgcgatgttgaatcgattaatgcctaccatcagttgttaagtgaagggcatgctgaagcggatgtgttaacgattttaggacagaagtcacgagacaattcgagaacgcctatgcaatggagtgatgatgttaatgctggatttacagctggtaagccttggattgatatttcggaaaattatcatcaggtcaacgttagacaagcacttcagaataaagagtctattttctatacgtatcaaaaattaatacaattaagacatacgcatgatattattacgtatggagacattgtgccacgttttatggatcatgatcatttatttgtttatgaacgtcattataagaatcaacaatggctagtaattgcgaatttctcagcatcggctgttgatttgccagaaggattggctagagaaggtcgtgttgtgattcaaacaggcacagtggaaaataatacgataagcgggtttggtgcaattgtaatcgaaacaaacgcgtaaaataaattgagtggatgcgtttatatggcgaaacaaaaaaagtttatgaagatttatgaggcgttgaaagaagatatattaaacgggcagattcaatatggtgaacaaattccgtctgaacatgatttggtgcaattgtaccagtcatctcgagagaccgtgcgtaaggcattagatttgttggcattagacggcatgattcaaaagattcatggtaaagggtcacttgtcatttatcaggaggttacagagtttccattttctgaactggttagttttaaagaaatgcaagaagaaatgggcgtcgcatatttaactgaagttgttgtgaatgaggttgttgaagcgcatgaagttccagaagttcaacatgctttaaacatcaattctagtgaatcactcattcatattgttagaactcgtcggcttaaccaacatgtgaagattgttgatgaagattattttctaaagtcgattgtttcagacataggtaatgatgttgcgagtgattctatttatgattatttggaaaaggtattaaatcttaatattagttattcaagtaagtctattacttttgaaccgtttgatgaacaagcatatcaattgtttggtgatgtatcggtggcttattcagcaacagttcgaagtattgtgtatttagaaaatacaatgccgtttcaatataatatttcaaaacatcttgcaaatgaatttaaatttaacgacttctcaagacgtcgtataaagtaaacaatgatataaatgatttatacttgcaattaactattaaaatatagtaatatatatcttgccgtgctaggtggggaggtagcggttccctgtactcgaaatccgctttatgcgaggcttaattcctttgttgaggccgtatttttgcgaagtctgcccaaagcacgtagtgtttgaagatttcggtcctatgcaatatgaacccatgaaccatgtcaggtcctgacggaagcagcattaagtggatcatcatatgtgccgtagggtagccgagatttagctaacgactttggttacgttcgtgaattacgttcgatgcttaggtgcacggttttttattttttaaatattaaaccgattattaagagttgaaaatatatatttatttatagaagctactttcttgaagacaattcagcgtattatacgtggaacatgtttgtgggaagtagcttttttatatgtgaagtttgattcaagtgaaatcgatgtgcagtttgaatgatttttgtgtcaatgaaaagtaagaagttattatttgatgataaagaaatgatggtgaaatgagggggagtatcttacaatagaattattaatgagatacgttatgattattgacaatcaaatgcctacggaggacatatgcaaatatatttaagtactttaacagagttagattatgataaatctttaaatagtattgaagaaagttttgatgataatcctgaaacgagttggcaagcacttgcgaaagtaaaacatttaagaaaatctccttgctataattttgaattagaagtaatagcgaaaaatgaaaataacgatgtcgttggacacgttttattaattgaagtagaaattaatagtgatgataagacgtattatggtttggcgattgcctctttatcagttcatcctgaattacgtggacaaaaattaggtcgtggcttggttcaagcagtagaagagcgtgccaaagcacaagagtatagtacggttgttgtagaccattgttttgactactttgaaaagttgggttatcaaaatgctgctgagcatgacattaaattagaatctggtgatgcaccgttacttgtaaaatatttatgggataatttgacggatgcaccacacggaatcgtaaaatttccagaacatttttattaattgttcaattaagaagtaaaggtattatcatgctataatgagaggtaattgtttatggaggtgctaacttgaattatcaagccttatatcgtatgtacagaccccaaagtttcgaggatgtcgtcggacaagaacatgtcacgaagacattgcgcaatgcgatttctaaagaaaaacagtcgcatgcttatatttttagtggtccgagaggcacggggaaaacgagtattgccaaagtgtttgctaaagcaatcaactgtttaaatagcactgatggagaaccttgtaatgaatgtcatatttgtaaaggcattacgcaggggactaattcagatgtgatagaaattgatgctgctagtaataatggcgttgatgaaataagaaatattagagacaaagttaaatatgcaccaagtgaatcgaaatataaagtttatattatagatgaggtgcacatgctaacaacaggtgcttttaatgcccttttaaagacgttagaagaacctccagcacacgctatttttatattggcaacgacagaaccacataaaatccctccaacaatcatttctagggcacaacgttttgattttaaagcaattagcctaaatcaaattgttgaacgtttaaaatttgtagcagatgcacaacaaattgaatgtgaagatgaagccttggcatttatcgctaaagcgtctgaagggggtatgcgtgatgcattaagtattatggatcaggctattgcatttggtgatggtacgttaacattgcaagatgcgttgaatgtcacaggtagcgtacatgatgaagcgttggatcacttgtttgatgatattgtacaaggtgacgtacaagcatcttttaaaaaataccatcagtttataacagagggtaaagaagtgaatcgcctaataaatgatatgatttattttgtcagagatacgattatgaataaaacatctgagaaagatactgagtatcgagcactgatgaacttagaattagatatgttatatcaaatgattgatcttattaatgatacattagtgtcgattcgttttagtgtgaatcaaaacgttcattttgaagtgttgttagtaaaattagctgagcagattaagggtcaaccacaagtgattgcgaatgtagctgaaccagcacaaattgcttcatcgccaaacacagatgtattgttgcaacgtatggaacagttagagcaagaactaaaaacactaaaagcacaaggagtgagtgtcgctcctgttcaaaaatcttcgaaaaagcctgcgagaggcatacaaaaatctaaaaatgcattttcaatgcaacaaattgcaaaagtgctagataaagcgaataaggcagatatcaaattgttgaaagatcattggcaagaagtgattgatcatgccaaaaacaatgataaaaaatcactcgttagtttattgcaaaattcggaacctgtggcggcaagtgaagatcacgtacttgtgaaatttgaggaagagatccattgtgaaatcgtcaataaagacgacgagaaacgtagtagtatagaaagtgttgtatgtaatatcgttaataaaaacgttaaagttgttggtgtaccatcagatcaatggcaaagagttcgaacggagtatttacaaaatcgtaaaaacgaaggcgatgatatgccaaagcaacaagcacaacaaacagatattgctcaaaaagcaaaagatcttttcggtgaagaaactgtacatgtgatagatgaagagtgatacatgacaagcgatataatcgtatgtataatgaaagaaacatcattttattgataaatatttattgattttcaaggaggaaatggaatatgcgcggtggcggaaacatgcaacaaatgatgaaacaaatgcaaaaaatgcaaaagaaaatggctcaagaacaagaaaaacttaaagaagagcgtattgtaggaacagctggcggtggcatggttgcagttactgtaactggtcataaagaagttgtcgacgttgaaatcaaagaagaagctgtagacccagatgatattgaaatgctacaagacttagtgttagcagctactaatgaagcgatgaataaagctgatgagcttactcaagaacgtttaggtaaacatactcaaggcttaaacatccctggaatgtgatcatagatgcattatccagaacctatatcaaaacttattgatagctttatgaaattgccaggcattggtccaaagacagcccaacgtctggcttttcataccttagatatgaaagaagacgatgttgttcagtttgccaaagcattagtagatgttaagagagaattaacatattgtagcgtatgtggtcacattactgaaaatgatccatgttatatttgtgaagataagcaaagagatcgttcagttatttgtgttgtggaagatgacaaagatgtcatagctatggaaaaaatgagagaatacaaaggtttatatcacgttttacatgggtctatttcgcctatggatggcattggaccagaagatattaatattccttcattgattgaacgcttgaaaaacgatgaagttagcgaattaatcttagctatgaacccgaacttagagggggaatctacagccatgtatatttctagattagttaagcctataggtatcaaagtgacgagattagcacaagggttatcggtaggtggcgatttagagtatgctgacgaagtaacattatctaaagcaatcgcaggtagaacagaaatgtaatgtcttctattaaacatttttgattttaatactatagtaagaaaagtcacagtgtaatcattgtggctttttttatggtgtggtgtgatgtactactttatttgcggtgtggcggtggtatggtttacctagttttactgagggatgggtaatctttaggaagcaagccgttggttgtgatttgttacttctaatagtaatgatgtgaattggattatcgaattagatctatggttatggtgtgttggtgctattaatttgataaatgcggttaatgactatgcaaatgaaattcttttgtaattgaaatgatagatgctggcttagtaagttgtacttctttggtctaaagcttattaaatcagcctgtatagcggtgttttgagagattatttaaaacttgtaaatttttttttaatttctggtaaaaaaataacgttctgttttgcggttttttttgattgatatggttagaaaaaaatctgtttcttgttctaaaaaacgtactatttataagtggggatttttttaagttcgatttttaggataagggcgttcagtacagatgacaaaggtgtaatttttactgttgttaagcagtttgaaagcctgtatagtatttatttgttgaggcaaacaaaacaattcaacttaagaaataacttgaattactaacgaaaattaattttaaaaagttgttgacttaaatgttaataaaatgtataattaattcttgtcggtaagaaaaatgaacattgaaaactgaatgacaatatgtcaacgttaattccaaaaaacgtaactataagttacaaacattatttagtatttatgagctaatcaaacatcataatttttatggagagtttgatcctggctcaggatgaacgctggcggcgtgcctaatacatgcaagtcgagcgaacggacgagaagcttgcttctctgatgttagcggcggacgggtgagtaacacgtggataacctacctataagactgggataacttcgggaaaccggagctaataccggataatattttgaaccgcatggttcaaaagtgaaagacggtcttgctgtcacttatagatggatccgcgctgcattagctagttggtaaggtaacggcttaccaaggcaacgatgcatagccgacctgagagggtgatcggccacactggaactgagacacggtccagactcctacgggaggcagcagtagggaatcttccgcaatgggcgaaagcctgacggagcaacgccgcgtgagtgatgaaggtcttcggatcgtaaaactctgttattagggaagaacatatgtgtaagtaactgtgcacatcttgacggtacctaatcagaaagccacggctaactacgtgccagcagccgcggtaatacgtaggtggcaagcgttatccggaattattgggcgtaaagcgcgcgtaggcggttttttaagtctgatgtgaaagcccacggctcaaccgtggagggtcattggaaactggaaaacttgagtgcagaagaggaaagtggaattccatgtgtagcggtgaaatgcgcagagatatggaggaacaccagtggcgaaggcgactttctggtctgtaactgacgctgatgtgcgaaagcgtggggatcaaacaggattagataccctggtagtccacgccgtaaacgatgagtgctaagtgttagggggtttccgccccttagtgctgcagctaacgcattaagcactccgcctggggagtacgaccgcaaggttgaaactcaaaggaattgacggggacccgcacaagcggtggagcatgtggtttaattcgaagcaacgcgaagaaccttaccaaatcttgacatcctttgacaactctagagatagagccttccccttcgggggacaaagtgacaggtggtgcatggttgtcgtcagctcgtgtcgtgagatgttgggttaagtcccgcaacgagcgcaacccttaagcttagttgccatcattaagttgggcactctaagttgactgccggtgacaaaccggaggaaggtggggatgacgtcaaatcatcatgccccttatgatttgggctacacacgtgctacaatggacaatacaaagggcagcgaaaccgcgaggtcaagcaaatcccataaagttgttctcagttcggattgtagtctgcaactcgactacatgaagctggaatcgctagtaatcgtagatcagcatgctacggtgaatacgttcccgggtcttgtacacaccgcccgtcacaccacgagagtttgtaacacccgaagccggtggagtaaccttttaggagctagccgtcgaaggtgggacaaatgattggggtgaagtcgtaacaaggtagccgtatcggaaggtgcggctggatcacctcctttctaaggatatattcggaacatcttcttcagaagatgcggaataacgtgacatattgtattcagttttgaatgtttatttaacattcaaatattttttggttaaagtgatattgcttatgcgagcgcttgactaaaaagaaattgtacattgaaaactagataagtaagtaaaatatagattttaccaagcaaaaccgagtgaataaagagttttaaataagcttgaattcataagaaataatcgctagtgttcgaaagaacactcacaagattaataacgcgtttcctgtaggatggaaacatagattaagttattaagggcgcacggtggatgccttggcactagaagccgatgaaggacgttactaacgacgatatgctttggggagctgtaagtaagctttgatccagagatttccgaatggggaaacccagcatgagttatgtcatgttatcgatatgtgaatacatagcatatcagaaggcacacccggagaactgaaacatcttagtacccggaggaagagaaagaaaattcgattcccttagtagcggcgagcgaaacgggaagagcccaaaccaacaagcttgcttgttggggttgtaggacactctatacggagttacaaaggacgacattagacgaatcatctggaaagatgaatcaaagaaggtaataatcctgtagtcgaaaatgttgtctctcttgagtggatcctgagtacgacggagcacgtgaaattccgtcggaatctgggaggaccatctcctaaggctaaatactctctagtgaccgatagtgaaccagtaccgtgagggaaaggtgaaaagcaccccggaaggggagtgaaatagaacctgaaaccgtgtgcttacaagtagtcagagcccgttaatgggtgatggcgtgccttttgtagaatgaaccggcgagttacgatttgatgcaaggttaagcagtaaatgtggagccgtagcgaaagcgagtctgaatagggcgtttagtatttggtcgtagacccgaaaccaggtgatctacccttggtcaggttgaagttcaggtaacactgaatggaggaccgaaccgacttacgttgaaaagtgagcggatgaactgagggtagcggagaaattccaatcgaacctggagatagctggttctctccgaaatagctttagggctagcctcaagtgatgattattggaggtagagcactgtttggacgaggggcccctctcgggttaccgaattcagacaaactccgaatgccaattaatttaacttgggagtcagaacatgggtgataaggtccgtgttcgaaagggaaacagcccagaccaccagctaaggtcccaaaatatatgttaagtggaaaaggatgtggcgttgcccagacaactaggatgttggcttagaagcagccatcatttaaagagtgcgtaatagctcactagtcgagtgacactgcgccgaaaatgtaccggggctaaacatattaccgaagctgtggattgtcctttggacaatggtaggagagcgttctaagggcgttgaagcatgatcgtaaggacatgtggagcgcttagaagtgagaatgccggtgtgagtagcgaaagacgggtgagaatcccgtccaccgattgactaaggtttccagaggaaggctcgtccgctctgggttagtcgggtcctaagctgaggccgacaggcgtaggcgatggataacaggttgatattcctgtaccacctataatcgttttaatcgatggggggacgcagtaggataggcgaagcgtgcgattggattgcacgtctaagcagtaaggctgagtattaggcaaatccggtactcgttaaggctgagctgtgatggggagaagacattgagtcttcgagtcgttgatttcacactgccgagaaaagcctctagatagaaaataggtgcccgtaccgcaaaccgacacaggtagtcaagatgagaattctaaggtgagcgagcgaactctcgttaaggaactcggcaaaatgaccccgtaacttcgggagaaggggtgctctttagggttaacgcccagaagagccgcagtgaataggcccaagcgactgtttatcaaaaacacaggtctctgctaaaccgtaaggtgatgtataggggctgacgcctgcccggtgctggaaggttaagaggagtggttagcttctgcgaagctacgaatcgaagccccagtaaacggcggccgtaactataacggtcctaaggtagcgaaattccttgtcgggtaagttccgacccgcacgaaaggcgtaacgatttgggcactgtctcaacgagagactcggtgaaatcatagtacctgtgaagatgcaggttacccgcgacaggacggaaagaccccgtggagctttactgtagcctgatattgaaattcggcacagcttgtacaggataggtaggagcctttgaaacgtgagcgctagcttacgtggaggcgctggtgggatactaccctagctgtgttggctttctaacccgcaccacttatcgtggtgggagacagtgtcaggcgggcagtttgactggggcggtcgcctcctaaaaggtaacggaggcgctcaaaggttccctcagaatggttggaaatcattcatagagtgtaaaggcataagggagcttgactgcgagacctacaagtcgagcagggtcgaaagacggacttagtgatccggtggttccgcatggaagggccatcgctcaacggataaaagctaccccggggataacaggcttatctcccccaagagttcacatcgacggggaggtttggcacctcgatgtcggctcatcgcatcctggggctgtagtcggtcccaagggttgggctgttcgcccattaaagcggtacgcgagctgggttcagaacgtcgtgagacagttcggtccctatccgtcgtgggcgtaggaaatttgagaggagctgtccttagtacgagaggaccgggatggacatacctctggtgtaccagttgtcgtgccaacggcatagctgggtagctatgtgtggacgggataagtgctgaaagcatctaagcatgaagcccccctcaagatgagatttcccaacttcggttataagatccctcaaagatgatgaggttaataggttcgaggtggaagcatggtgacatgtggagctgacgaatactaatcgatcgaagacttaatcaaaataaatgttttgcgaagcaaaatcacttttacttactatctagttttgaatgtataatttacattcatatgtctggtgactatagcaaggaggtcacacctgttcccatgccgaacacagaagttaagctccttagcgtcgatggtagtcgaacttacgttccgctagagtagaacgttgccaggcaaaaaatggatgcgatgagccgcattgagaccgcaaggtctcttttttttatgtctaaaacatcaaaataaaaagcaaacacaaagaaaaatggcttggcgaagtgaaaacgtttgaatctgacgaaacgagaaaagagcgcaacgagtttagtagagctaaatgagtaagcgagagccgaaggagaggaaagaagcaagcgattgtcacaagtcaagaaaggttcttagcgacgatggtagccaacttacgttccgctagagtagaacgttgccaggcaaaaatggatgcgatgagccgcattgagaccgtgaggtctctttttttatgtctaaaacatcaaaataaaaagcaaacacaaagaaaaatggcttggcgaagtgaaaacgtttgaatctgacgaaacgagaaaagagcgcaacgagtttagtagagctaaatgagtaagtgagagccgaaaaagaggaaagaagcaagcaattgtcacaagtcaagaaaggtctttagcgacgatggtagccaacttacgttccgctagagtagaacgttgctaggcaagaaatggatgcgatgagccgcattgagttttggaaatgatattttaataatgtgcacttttgattgtttaaatctgtgactagaagtataagtgaagacattcagaagtattataaaaagtgaacagcagtaagatagtttttaatcataaatcatcttactgctgtttttaggttttatgtctaatattttttaaatcgaaatacaaaaaggaaattaattattatacaatagacaagctattgcataagtaacactaacttttgtcaaagaagtgttactatataattaatacttttgaaagtaactaattccaaaacagtgtaaataaaggaagcgtatatcatgaagcaacctattttaaataaattagaaagtttaaatcaagaagaagcgatttctttgcatgttccgggtcataaaaatatgactatcggtcatttatctcaattatcaatgacaatggataaaactgaaatacctggattagatgatttacatcatcctgaagaagtcattttggaaagtatgaagcaggtggagaaacattcagattatgatgcttatttcttagtgaatggcaccacttcaggaatattatctgtcatccagtctttttcacagaaaaaaggcgatatcttaatggcaagaaatgtacataaatctgtattacatgcgctcgatattagccaacaagaagggcattttattgaaacgcatcaaagtccgttaacgaatcattataataaagttaatttaagccgtttgaataatgacggtcacaaacttgctgtgttgacttatcctaactattacggtgaaacatttaatgtagaagaggttatcaaatctttgcaccaattaaatattcctgtactcattgacgaagcacacggcgcgcactttggattgcaaggatttccagattctacattaaattatcaagctgactatgttgttcaatcttttcataaaacgttaccagctttaacgatgggctcggtactttatattcataaaaatgcaccttatagagaaactattatagaatatctaagctacttccaaacatctagtccttcgtatttgattatggctagtttagagtcagctgcccagttctataaaacatatgatagtaccgtgttttttgataagagagcacaattaatcgaatgtttggagaataaaggttttgaaatgcttcaagttgatgatccgttgaagttgttgataaaatatgatggctttacaggacatgatattcaaagttggtttatgaatgcacatatctatttagagttagcagacgactatcaagctttagcaatattgccgttatggcatcatgatgatacgtatttatttgattcgcttttacgtaaaattgaagatatgattttaccgaaaaaatcagtttctaaagttaaacaaacacaacttttaacaactgaaggtaactataaaccaaaacgctttgaatatgttacttggtgtgatttgaaaaaggcaaaaggtaaagttctggcgcgacatattgtcccgtatccgccagggattcctattattttcaaaggagaaacaataactgaaaatatgatagaattggtaaatgaatatctggaaactggaatgatagttgaaggaattaaaaataataaaattttagttgaggatgaataaaatgtcagcttttataacttttgagggcccagaaggctctggaaaaacaactgtaattaataaagtttaccatagattagtaaaagattatgatgtcattatgacaagagaaccgggcggcgttcctactggtgaagaaatacgtaaaattgtattagaaggcaatgatatggacattagaactgaagcaatgttatttgctgcatctagaagagaacatcttgtattaaaggtcataccagctttaaaagaaggtaaggttgtgttgtgtgatcgctatatcgatagttcattagcttatcaaggttatgctagagggattggcgttgaagaagtaagagcattaaacgaatttgcaataaatggattatatccagacttgacgatttatttgaatgttagtgctgaagtaggccgcgaacgtattattaaaaattcaagagatcaaaatagattagatcaagaagatttaaagtttcacgaaaaagtaattgaaggttaccaagaaatcattcataatgaatcacaacggttcaaaagcgttaatgcagatcaacctcttgaaaatgttgttgaagacacgtatcaaactatcatcaaatatttagaaaagatatgatataattgttagaagaggtgttataaaatgaaaatgattatagcgatcgtacaagatcaagatagtcaggaacttgcagatcaacttgttaaaaataactttagagcaacaaaattggcaacaacaggtgggtttttaagagcaggtaatacaacattcttatgtggtgtcaatgatgaccgtgtagatgaaatattgtctgtgattaatcaaacgtgtggtaatagagaacagttggtttcacctattacacctatgggaggcagtgcggattcgtacattccatatccagttgaagttgaagttggcggtgctactgtatttgttatgccagttgatgcattccatcaattttaattctataatacaatcatcaattagagatacttaaaatagtgtattaataagttattaacaattttgggttgcttgactgcgactagttcagatgccaatagatttgatttttgtggttctaaaaataatcacaaatcatggtcgctattgttgcagtaattagttgctctttggcaacctttttatataaaagcaaaagggagtttgtaatgaatggatgaacagcaacaattgacgaatgcatatcattcaaataaattatcgcatgcctatttatttgaaggtgatgatgcacaaacgatgaaacaagttgcgattaattttgcaaagcttattttatgtcaaacagatagtcaatgtgaaacaaaggttagtacatataatcatccagactttatgtatatatcaacaactgagaatgcaattaagaaagaacaagttgaacaacttgtgcgtcatatgaatcaacttcctatagaaagcacaaataaagtgtacatcattgaagactttgaaaagttaactgttcaaggggaaaacagtatcttgaaatttcttgaagaccaaccggacaatacgattgctattttattgtctacaaaacctgagcaaattttagacacaatccattcaaggtgtcagcatgtatatttcaagcctattgataaagaaaagtttataaatagattagttgaacaagacatgtctaagccagtagctgaaatgattagtacttatactacgcaaatagataatgcaatggctttaaatgaagaatttgatttattagcattaaggaaatcagttatacgttggtgtgaattgttgcttactaataagccaatggcacttataggtattattgatttattgaaacaggctaaaaataaaaaactgcaatctttaactattgcagctgtgaatggtttcttcgaagatatcatacatacaaaggtaaatgtagaggataaacaaatatatagtgatttaaaaaatgatattgatcaatatgcgcaaaagttgtcgtttaatcaattaattttgatgtttgatcaactgacggaagcacataagaaattgaatcaaaatgtaaatccaacgcttgtatttgaacaaatcgtaattaagggtgtgagttagatgccaaatgtaataggtgttcagtttcaaaaagcgggaaaattagaatattatacacctaatgatatacaagtagatatagatgactgggtagttgtcgaatctaaaagaggcatagagataggtattgttaaaaatccattaatggatattgctgaagaggatgttgtgttacctcttaaaaatattattcgcattgctgatgacaaagatattgataaatttaattgtaatgaacgagatgctgaaaatgcattaatactatgtaaagacattgtaagagaacaaggtttggacatgcgtttagtcaattgcgaatatacattagataaatcgaaagttatttttaattttacggcggatgatcgtattgattttagaaaattagtaaaaatattagcgcaacatttaaaaacacgtatcgagttgagacaaattggtgtaagggatgaagccaaattgcttggcggtatcggaccttgtggtaggtcgttatgttgttctacatttttaggggattttgaaccagtatcgattaagatggctaaggatcaaaatttatcattaaatccaactaaaatttccggtgcatgtggtcgtttgatgtgttgtttaaaatatgaaaatgactactatgaggaagtacgtgcacaattacctgatatcggtgaagcaattgaaacgcctgatggtaacgggaaagtagttgctttaaatatattagacatttctatgcaggtgaagcttgagggacatgaacagccacttgaatataaattagaagaaatagaaactatgcattaaggaggcattattacatttggatcgcaatgaaatatttgaaaaaataatgcgtttagaaatgaatgtcaatcaactttcaaaggaaacttcagaattaaaggcacttgcagttgaattagtagaagaaaatgtagcgcttcaacttgaaaatgataatttgaaaaaggtgttgggcaatgatgaaccaactactattgatactgcgaattcaaaaccagcaaaagctgtgaaaaagccattaccaagtaaagataatttggctatattgtatggagaaggatttcatatttgtaaaggcgaattatttggaaaacatcgacatggtgaagattgtctgttctgtttagaagttttaagtgattaatcaagcacactcaaatagtgttataattataaatgaatatggtttggataagtctgagacaatgcatgtttcaggctttaattgtgtataaagttttggtgattgcataagagatagcggtactaaatgttattattaagtgtgcacgcagtatcattagttataaaatgtagctgttaaaagtcaaaaatacatcgaatgtagataggcatataatataaaaagagatttcaattactcaatagaaaaaggttgtcttcataggagttaaaaatgttaaaagagaatgaacgatttgatcaactaatcaaagaagattttagtattattcaaaatgatgatgttttttcgttttcaacggatgctttgttgttagggcattttacaaaacctagaacaaaagatatagtgttggacttatgttcaggcaatggggtgatacccttgttattgtttgcgaaacatccacgacatatagaaggtgttgagattcaaaaaacacttgtcgatatggcgcgacgcacatttcaattcaatgatgttgatgaatatttaacaatgcatcacatggatttgaaaaacgttactaaagtatttaaaccttcacaatatactttagtaacgtgtaatccgccttattttaaagagaatcagcaacaccaacatcaaaaagaagcacataagatagcgagacatgagattatgtgtacacttgaagattgcatgattgcagcccgtcatttattaaaagaaggtggcaggctaaacatggtacatcgtgcagagagactaatggatgtcttgtttgaaatgagaaaagtgaatattgaacctaagaaagtcgtttttatatatagtaaagtagggaaatcagcacaaacgatagtagtagaaggtcgaaaaggtggaaatcaaggtttagaaatcatgcccccattttatatttataatgaagatggtaattatagcgaagaaatgaaggaagtatattatggatagtcattttgtatatattgtaaaatgtagtgatggaagtttatatacaggatacgctaaagacgttaatgcacgtgttgaaaaacataaccgaggtcaaggagccaaatatacgaaagtaagacgtccggtgcatttagtttatcaagaaatgtatgagacaaagtctgaagcattgaagcgtgaatatgaaattaaaacttataccagacaaaagaaattgcgattaattaaggagcgatagtatggctgtattatatttagtgggcacaccaattggtaatttagcagatattacttatagagcagttgatgtattgaaacgtgttgatatgattgcttgtgaagacactagagtaactagtaagctgtgtaatcattatgatattccaactccattaaagtcatatcacgaacataacaaggataagcagactgcttttatcattgaacagttagaattaggtcttgacgttgcgctcgtatctgatgctggattgcccttaattagtgatcctggatacgaattagtagtggcagccagagaagctaatattaaagtagagactgtgcctggacctaatgctgggctgacggctttgatggctagtggattaccttcatatgtatatacatttttaggatttttgccacgaaaagagaaagaaaaaagtgctgtattagagcaacgtatgcatgaaaatagcacattaattatatacgaatcaccgcatcgtgtgacagatacattaaaaacaattgcaaagatagatgcaacacgacaagtatcactagggcgtgaattgactaagaagttcgaacaaattgtaactgatgatgtaacacaattacaagcattgattcagcaaggcgatgtaccattgaaaggcgaattcgttatcttgattgagggtgctaaagcgaacaatgagatatcgtggtttgatgatttatctatcaatgagcatgttgatcattatattcaaacttcacagatgaaaccaaaacaagctattaaaaaagttgctgaagaacgacaacttaaaacgaatgaagtatataatatttatcatcaaataaattaattactttatcgattatatgaaattttaaacgattttataaacgcaagctgtaattttaaatggtaagttatcattttgcattgatactgataaaatgatgttgactatgataaaaaaatgatgacatcgacgttttttaatgtaaaataaatacattgaaagtaataaataccttaacattgaataagatgaaaatgagatgacgagataaatgttcgcgtccgttgaaatgcatagaaatcttagatattatttgaagtgagacattacgaggaggaacagttatggctaaagaaacattttatataacaaccccaatatactatcctagtgggaatttacatataggacatgcatattctacagtggctggagatgttattgcaagatataagagaatgcaaggatatgatgttcgttatttgactggaacggatgaacacggtcaaaaaattcaagaaaaagctcaaaaagctggtaagacagaaattgaatatttggatgagatgattgctggaattaaacaattgtgggctaagcttgaaatttcaaatgatgattttatcagaacaactgaagaacgtcataaacatgtcgttgagcaagtgtttgaacgtttattaaagcaaggtgatatctatttaggtgaatatgaaggttggtattctgttccggatgaaacatactatacagagtcacaattagtagacccacaatacgaaaacggtaaaattattggtggcaaaagtccagattctggacacgaagttgaactagttaaagaagaaagttatttctttaatattagtaaatatacagaccgtctattagaattctatgaccaaaatccagattttatacaaccaccatcaagaaaaaatgaaatgattaacaacttcattaaaccaggacttgctgatttggctgtttctcgtacatcatttaactggggtgtccatgttccgtctaatccaaaacatgttgtttatgtttggattgatgcgttagttaactatatttcagcattaggctatttatcagatgatgagtcactatttaacaaatactggccagcagatattcatttaatggctaaggaaattgtgcgattccactcaattatttggcctattttattgatggcattagacttaccgttacctaaaaaagtcttcgcacatggttggattttgatgaaagatggaaaaatgagtaaatctaaaggtaatgtcgtagaccctaatattttaattgatcgctatggtttagatgctacacgttattatctaatgcgtgaattaccatttggttcagatggcgtatttacacctgaagcatttgttgagcgtacaaatttcgatctagcaaatgacttaggtaacttagtaaaccgtacgatttctatggttaataagtactttgatggcgaattaccagcgtatcaaggtccacttcatgaattagatgaagaaatggaagctatggctttagaaacagtgaaaagctacactgaaagcatggaaagtttgcaattttctgtggcattatctacggtatggaagtttattagtagaactaataagtatattgacgaaacaacgccttgggtattagctaaggacgatagccaaaaagatatgttaggcaatgtaatggctcacttagttgaaaatattcgttatgcagctgtattattacgtccattcttaacacatgcgccgaaagagatttttgaacaattgaacataaacaatcctcaatttatggaatttagtagtttagagcaatatggtgtgcttactgagtcaattatggttactgggcaacctaaacctattttcccaagattggatagcgaagcggaaattgcatatatcaaagaatcaatgcaaccgcctgctactgaagaggaaaaagaagagattcctagcaaacctcaaattgatattaaagactttgataaagttgaaattaaggcagcaacgattattgatgctgaacatgttaagaagtcagataagcttttaaaaattcaagtagacttagattctgaacaaagacaaattgtatcaggaattgccaaattctatacaccagatgatattattggtaaaaaagtagcagttgttactaacctgaaaccagctaaattaatgggacaaaaatctgaaggtatgatattatctgctgaaaaagatggtgtattaaccttagtaagtttaccaagtgcaattccaaatggtgcagtgattaaataactgtatttttaaaaattaggagagataattatgttaatcgatacacatgtccatttaaatgatgagcaatacgatgatgatttgagtgaagtgattacacgtgctagagaagcaggtgttgatcgtatgtttgtagttggttttaacaaatcgacaattgaacgcgcgatgaaattaatcgatgagtatgattttttatatggcattatcggttggcatccagttgacgcaattgattttacagaagaacacttggaatggattgaatctttagctcagcatccaaaagtgattggtattggtgaaatgggattagattatcactgggataaatctcctgcagatgttcaaaaggaagtttttagaaagcaaattgctttagctaagcgtttgaagttaccaattatcattcataaccgtgaagcaactcaagactgtatcgatatcttattggaggagcatgctgaagaggtaggcgggattatgcatagctttagtggttctccagaaattgcagatattgtaactaataagctgaatttttatatttcattaggaggacctgtgacatttaaaaatgctaaacagcctaaagaagttgctaagcatgtgtcaatggagcgtttgctagttgaaaccgatgcaccgtatctttcgccacatccgtatagagggaagcgaaatgaaccggcgagagtaactttagtagctgaacaaattgctgaattaaaaggcttatcttatgaagaagtgtgcgaacaaacaactaaaaatgcagagaaattgtttaatttaaattcataaagttaaaagtgagaaagatcaccgccataaatgtaaacgatgctatattcgtttaatatgctatggttctttctcacttttttaaattaaaatattaatgcagttgaatggattgaaaaaagatagtttttagtattaaaaactttatagtagagaaaggcgttttaaatgaaaatcaatgagtttattgttgttgaaggtcgagatgatactgaacgtgttaaacgagctgtagaatgtgatacgattgaaacaaatggcagtgcaatcaatgagcaaactttggaagtaattagaaatgcacaacaaagtcgtggtgtcattgtactgacagatccagattttcctggagataaaattagaagtacaattacggagcatgtaaaaggtgttaaacacgcatatattgatagagacaaagctaaaaataaaagaggaaaaatcggtgttgaacatgctgaattagaagatataaaggaagcgttaatgcatgtgagttcaccatttgaagaagcatatgagtcaattgataaaaccgtgttaattgagttaggactaattgtcggtaaagatgctagacgtcgtcgtgaaattttaagtaggaaattacgaattggtcactcaaacggaaagcaattattgaagaagttaaatgcttttggttatacggaaacagatgtaaggcaagctttaaaagatgaataaggaagtgaatcagttggataataaagatattgcaacgccatctcgaacacgagcattattagataaatatggatttaattttaagaaaagtttaggtcagaactttttaatagacgttaatattataaataatattatcgatgcaagtaatattgatgaacgtactggtgttattgaaattggacctggtatggggtcattaactgaacagttggcgaaacacgctaaaaaagtattggcatttgaaatagaccaacgcttaatacctgtacttaaggacacattatcaccatatgataatgtgacagtgattaacgaagatattttaaaagcaaatattaaagcagcagttgaaaaccatttacaagactgcgaaaaaataatggttgtcgcgaatttaccgtattacattacaacgccgatacttttaaatttgatgcaacaagatataccaattgatggctacgtggtgatgatgcaaaaagaagtgggcgaacgcttaaatgctgaagtaggttcaaaagcatatggttcgttatcaattgtcgtacaatactatacagagactagtaaagtattaacggtacctaaatctgtatttatgccaccacctaatgttgattcaatagttgtaaaactgatgcagagaactgaaccgttagtaacagtagataacgaggaagcattctttaagttagcaaaagcagcatttgcacaaagaagaaagacaattaacaataactatcaaaattattttaaagatggtaaacaacacaaagaagtgattttacaatggttggaacaagcaggtattgatccaagacgtcgcggtgaaacgctatctattcaagattttgctaaattgtatgaagaaaagaaaaaattccctcaattagaaaattaaatgattgacaaagcaaagcactattgttaaaatttaaattttgtttgacgaaaacgctgcaaatatggtattatgtaacttgtagcgaggtggagcaatatgccaaaatcaattttggacatcaaaaattctattgattgtcatgtaggaaatcgtattgtactgaaagccaatggaggccgtaagaaaacaataaaacgttctggaattttaaaagaaacatatccgtcagttttcattgttgagttagatcaagacaaacacaactttgagagagtatcttatacatacactgatgtgttaactgaaaatgttcaagtttcatttgaagaggataatcatcacgaatcaattgcacactaaataagacatatagagatgttagacgtttcttagtataagaagtaaatattatgataattatttgagtgttgggcattatgttcaatactctttttatttacaaaatgtttaacactgatgtttcgcttatagatttttcagtaaatggataattgtatttataaacacaaatacaagtaaatactaagtaattagatggagaaaattacttttttattaaaaaaacactaaaaaacaaattaaaatgtcaaatattaattctctttatgttaaaatcatcatattaagataacgaaaagagggcggaaaatgatatatgaaacggcaccagccaaaattaattttacgctcgatacactttttaaaagaaatgatggctatcatgagattgaaatgataatgacaacagttgatttaaatgatcgtttaacttttcataaaagaaaagatcgaaagatagttgttgagattgaacataattatgtgccttctaatcataaaaatctcgcatatcgtgcagcgcaactatttattgagcaatatcaactaaagcaaggtgtaacaatttctatcgataaagaaatacctgtttctgctggcttagctggaggttcggctgatgcagcagcaactttaagaggattgaatcgactttttgatataggggcgagtttggaagaattggctctactaggcagtaaaattgggacagatattccgttttgtatttataataaaactgcactatgtactggaagaggagagaaaatcgagtttttaaataaaccaccttcagcttgggtgattcttgctaaaccaaacttaggcatatcatcaccagatatatttaagttgatcaatttagataagcgttacgacgtacatacgaaaatgtgttatgaggccttagaaaatcgagattatcaacaattatgtcaaagtttgtctaatcgattagagccaatttctgtttcaaaacacccacaaatcgataaattaaaaaataatatgttgaaaagtggtgcagatggtgcgttaatgagtggaagcggaccgactgtgtatgggctagcacgaaaagaaagccaagcaaaaaatatttataatgcagttaacggttgttgtaatgaagtgtacttagttagactattaggatagaagggttgaaaagatgagatataaacgaagcgagagaattgtttttatgacgcaatatttgatgaaccatccgaataaattgattccattaactttttttgtgaaaaaatttaaacaggcgaagtcttcaataagtgaagatgtccaaattataaaaaatacattccaaaaagaaaagttaggtacagtaattactactgctggcgcaagtggtggtgttacgtataaaccaatgatgagtaaagaagaggcgactgaagttgttaatgaggtcattactctattagaagagaaagaacgtttgttacctggcggatatttatttttatcagatttggtaggtaatccatcgctactaaacaaagttggtaagttaattgccagtatttacatggaagaaaaattagatgctgttgttaccattgcgacaaaaggtatttcattggcaaatgcggttgctaatattttaaatttaccagtagtagtgattagaaaagacaacaaggtgactgaaggttctacagtttcaattaattacgtttcaggatcttcaagaaaaatagaaacaatggtactttcgaagagaactttagcagaaaattcaaatgttttagttgtcgatgattttatgagggctggtggctctattaatggtgttatgaatttaatgaatgagtttaaagcccatgtaaaaggggtatcagtacttgtagaatcaaaagaagttaaacaaagattgattgaagattatacttccttagtgaaattatctgatgtagatgaatataatcaagagtttaacgtagaacctggcaacagtttatctaagttttcataaaaggagttttagtattatgaaaatcattaacacaacaagattaccggaagcacttggaccatattcgcatgcaacagttgtgaatggtatggtttatacttctggtcagattccattgaatgttgatggagaaatcgtaagcgctgatgttcaagcacagacaaagcaagttttagaaaatttaaaggttgttttggaagaagcaggatctgatttgaattctgttgcgaaagcgaccattttcattaaagatatgaatgatttccaaaaaataaatgaagtgtatggtcaatattttaatgaacacaagccagcgcgtagttgtgtagaggttgcgcgtttgccaaaagatgtgaaagtagaaattgaattagtaagtaaaattaaggaattataattttcgattaatatgtttaatcaagcttctaaataaaacagagagatatatactataggggggctcactacatgaaagtgacagatgtaagacttagaaaaatacaaacagatggacgaatgaaagcactcgtttccattacattagatgaagctttcgtaattcatgatttacgtgtaattgaaggaaactctggcttgttcgttgcaatgccaagtaaacgtacaccagatggtgaattccgcgacatcgcgcatcctattaattcagatatgagacaagaaattcaagatgcagtgatgaaagtatatgatgaaacagatgaagtagtaccagataaaaacgctacatcagaagattcagaagaagcttaatcaattttatatttagcgatgtaatacatttgcaataagttgatttgatactgtcgataaagcataaagctttgtcggcagttttttagtttgtattaatgtttttttatttttaatgaaaggttaataaatatatatgttaacagattatgatgatatgaaaattattgattcattgctgataaaaattgcgtttgaatgatgctcgtatttttgaagtaagaaaaaagttgtttttaaaattacaacgaattaaaaacaatgccttttatatgttgaaagagtattgcagattaaattataataatgacgaagtgtaaaatttaatgggggttaatgttcatgcgaagacacgcgataattttggcagcaggtaaaggcacaagaatgaaatctaaaaagtataaagtgctacacgaggttgctgggaaacctatggtcgaacatgtattggaaagtgtgaaaggctctggtgtcgatcaagttgtaaccatcgtaggacatggtgctgaaagtgtaaaaggacatttaggcgagcgttctttatacagttttcaagaggaacaactcggtactgcgcatgcagtgcaaatggcgaaatcacacttagaagacaaggaaggtacgacgatcgttgtatgtggtgacacaccgctcatcacaaaggaaacattagaaacattgattgcgcatcatgaggatgctaatgctcaagcaactgtattatctgcatcgattcaacaaccatatggatacggaagaatcgttcgaaatgcgtcaggtcgtttagaacgcatagttgaagagaaagatgcaacgcaagctgaaaaggatattaatgaaattagttcaggtattttagcgtttaataataaaacgttgtttgaaaaattaacacaagtgaaaaatgataatgcgcaaggtgaatattacctccctgatgtattgtcgttaattttaaatgatggcggcatcgtagaagtctatcgtaccaatgatgttgaagaaatcatgggtgtaaatgatcgtgtaatgcttagtcaggctgagaaggcgatgcaacgtcgtacgaatcattatcacatgctaaatggtgtgacaatcatcgatcctgacagcacttatattggtccagacgttacaattggtagtgatacagtcattgaaccaggcgtacgaattaatggtcgtacagaaattggcgaagatgttgttattggtcagtactctgaaattaacaatagtacgattgaaaatggtgcatgtattcaacagtctgttgttaatgatgctagcgtaggagcgaatactaaggtcggaccgtttgcgcaattgagaccaggcgcgcaattaggtgcagatgttaaggttggaaattttgtagaaattaaaaaagcagatcttaaagatggtgccaaggtttcacatttaagttatattggcgatgctgtaattggtgaacgtactaatattggttgcggaacgattacagttaactatgatggtgaaaataaatttaaaactatcgtcggcaaagattcatttgtaggttgcaatgttaatttagtagcacctgtaacaattggtgatgatgtattggtggcagctggttccacaatcacagatgacgtaccaaatgacagtttagctgtggcaagagcaagacaaacaacaaaagaaggatataggaaataatcatttacgtatttaaaatgactaggataaaaggataatcctatgtaatattaatgtaatctttatgatttaatgattcgcatagtaatggagttacattttatatataatagtaattgcgtaattaaataattggaggactataaatgttaaataatgaatataagaattcgtcattaaagattttttcattgaaaggaaacgaagcattagcgcaagaagttgctgaccaagtaggaattgaactaggtaaatgttcagttaaacgttttagtgatggagaaattcaaattaatatcgaagagagtattcgtggttgtgacgtatttattattcaaccaacatcatatcctgtgaatctacatttaatggaattattaattatgattgacgcttgtaaacgtgcttctgcagcaacaatcaatattgtagtgccatattatggatatgcaagacaagatagaaaagcccgtagccgtgagccaatcacagctaaattagttgcaaacttaatcgaaacagctggcgcaactcgtatgattgcgttagacttacatgcaccacaaattcaaggattctttgatattccaattgaccacttaatgggtgtgccaattcttgctaaacatttcaaagatgatccgaatattaacccagaagaatgtgtcgttgtttcaccagaccatggcggtgttacacgtgcacgtaaattagctgacattttaaaaactccaattgcaattatagataaacgtcgtcctagaccaaatgttgctgaagtgatgaacattgttggtgagattgaaggacgtacggcaattattattgacgatattattgatacagcaggtacaatcactttagctgcacaagcattaaaagataaaggtgctaaagaagtatatgcttgttgtacacaccctgttttatcaggaccggctaaagaacgtatcgaaaattctgctataaaagaattaatcgtaacaaactcaattcatttagatgaagaccgcaaaccatctaacactaaagaattatctgttgctggtttaatcgcacaagctatcattcgtgtatacgaaagagaatcagttagcgtattatttgactaatatttaaaaggcgtttgacgaacatattccaaacgtgtataatagtttcgttcgtgattatacgaataaataaacacttgcaagcaacgatgatgttgatgggtaagtgaggtgctcgttttgagcaaaaatgaaaggtggaaatgagaatggcttcattaaagtcaatcatccgtcaaggtaaacaaacacgttcagatcttaaacaattaagaaaatctggtaaagtaccagcagtagtatacggttacggtactaaaaacgtgtcagttaaagttgatgaagtagaattcatcaaagttatccgtgaagtaggtcgtaacggtgttatcgaattaggcgttggttctaaaactatcaaagttatggttgcagactaccaattcgatccacttaaaaaccaaattactcacattgacttcttagcaatcaatatgagtgaagaacgtactgttgaagtaccagttcaattagttggtgaagcagtaggcgctaaagaaggcggcgtagttgaacaaccattattcaacttagaagtaactgctactccagacaatattccagaagcaatcgaagtagacattactgaattaaacattaacgacagcttaactgttgctgatgttaaagtaactggcgacttcaaaatcgaaaacgattcagctgaatcagtagtaacagtagttgctccaactgaagaaccaactgaagaagaaatcgaagctatggaaggcgaacaacaaactgaagaaccagaagttgttggcgaaagcaaagaagacgaagaaaaaactgaagagtaattttaatctgttacattaaagtttttatactttgtttaacaagcactgtgcttattttaatataagcatggtgctttttgtgttattataaagcttaattaaactttattgctttgtaataaagtttaattaattttagtgagtaaaagacattaaactcaacaatgatacatcataaaaattttaatgtactcgattttaaaatacatacttactaagctaaagaataatgataattgatggcaatggcggaaaatagatgttgtcattataataataaatgaaacaattatgttggaggtaaacacgcatgaaatgtattgtaggtctaggtaatataggtaaacgttttgaacttacaagacataatatcggctttgaagtcgttgattatattttagagaaaaataatttttcattagataaacaaaagtttaaaggtgcatatacaattgaacgaatgaacggcgataaagtgttatttatcgaaccaatgacaatgatgaatttgtcaggagaagcagttgcaccgattatggattattacaatgttaatccagaagatttaattgtcttatatgatgatttagatttagaacaaggacaagttcgcttaagacaaaaaggaagtgcgggcggtcacaatggtatgaaatcaattattaaaatgcttggtacagaccaatttaaacgtattcgtattggtgtgggaagaccaacgaatggtatgacggtacctgattatgttttacaacgcttttcaaatgatgaaatggtaacgatggaaaaagttatcgaacacgcagcacgcgcaattgaaaagtttgttgaaacatcacgatttgaccatattatgaatgaatttaatggtgaagtgaaataatgacaatattgacaacgcttataaaagaagataatcattttcaagaccttaatcaggtatttggacaagcaaacacactagtaactggtctttccccgtcagctaaagtgacgatgattgctgaaaaatatgcacaaagtaatcaacagttattattaattaccaataatttataccaagcagataaattagaaacagatttacttcaatttatagatgctgaagaattgtataagtatcctgtgcaagatattatgaccgaagagttttcaacacaaagccctcaactgatgagtgaacgtattagaactttaactgcgttagctcaaggtaagaaagggttatttatcgttcctttaaatggtttgaaaaagtggttaactcctgttgaaatgtggcaaaatcaccaaatgacattgcgtgttggtgaggatatcgatgtggaccaatttcttaacaaattagttaatatggggtacaaacgggaatccgtggtatcgcatattggtgaattctcattgcgaggaggtattatcgatatctttccgctaattggggaaccaatcagaattgagctatttgataccgaaattgattctattcgggattttgatgttgaaacgcagcgttccaaagataatgttgaagaagtcgatatcacaactgcaagtgattatatcattactgaagaagtgatcagccatcttaaagaagagttaaaaactgcatatgaaaatacaagacccaaaatagataaatcagtgcgcaatgatttgaaagaaacgtatgaaagctttaaattattcgaaagtacatactttgatcatcaaatactacgtcgcttagtagcgtttatgtatgaaacaccttcgacaattattgagtatttccaaaaagatgcaatcattgcagttgatgaatttaatcgtattaaagaaactgaagaaagtttaacagtagagtctgattcgtttattagcaatattattgaaagtggtaatggatttataggacaaagttttataaaatatgatgattttgaaacattgattgaaggctatcctgtcacttatttttcattattcgctacaacaatgccgataaaactaaatcatattattaaattttcatgtaaacctgtccaacaattttatgggcaatatgacattatgcgttctgaatttcaacgatatgttaatcaaaactatcatatcgtggttttggtcgaaaccgaaactaaagttgaacgtatgcaagcgatgttaagtgaaatgcatattccatcaataacaaaattgcatcgctcaatgtcatcgggacaagcagtgattattgagggcagtttatctgaaggatttgaactacctgatatgggattagttgtcattactgagcgtgagctttttaaatcaaaacagaaaaagcaacgaaaacgtacgaaagctatctcaaatgctgaaaaaattaagtcttaccaagatttaaatgtgggagattatattgttcatgtgcatcatggtgttggtagatatttaggtgttgagacgctcgaagtggggcaaacgcatcgtgattatattaaattgcaatataaaggtacggatcaactatttgttccagtagatcaaatggatcaagttcaaaaatatgtagcttcggaagataagacgccaaaattaaataaactcggtggcagtgaatggaaaaaaacaaaagctaaagttcaacaaagtgttgaagatattgctgaagagttgattgatttatataaagaaagagaaatggcagaaggttatcaatatggggaagacacagctgagcaaacaacatttgaattagattttccatatgaacttacgcctgaccaagctaaatctatcgatgaaattaaagatgacatgcaaaaatcgcgtccaatggatcgcttgctatgtggtgatgttggttatggtaaaactgaagttgcagtgagagcagcattcaaagctgtaatggaaggaaagcaggttgcatttttagttcctacaactattttagctcagcaacattatgagacgttaattgagcgtatgcaagattttcctgttgaaattcaattaatgagtcgttttagaacgcctaaagagataaaacaaactaaggaaggacttaaaactggatttgttgacatagttgttggtacacacaaattacttagtaaagatatacagtataaagatttagggctgttgattgtagatgaagaacaacgatttggtgtacgccataaagagcgtattaaaacattaaaacataatgtagatgtactaacattgactgcaaccccaatacctagaacattgcatatgagtatgctaggtgtgcgcgatttgtcagtgattgaaacgccgccagaaaatcgtttcccagttcaaacatatgtattagaacagaacatgagttttatcaaagaagctttagaaagagaactatcccgtgatggccaagtgttttatctttataataaagtgcaatccatttatgaaaaacgagaacaactccagatgttaatgccagatgctaacattgcagttgctcatggacaaatgacagagcgcgatttagaagaaacgatgttaagttttatcaataatgaatatgatattttagtaacgacgacgattattgaaacaggtgtcgatgtcccaaatgcaaatactttgatcattgaagatgcagatcgctttggattgagtcagttgtatcaattaagaggtcgtgttggtcgttcaagtcgtattggttatgcatacttcttacatccagcaaataaggtactaactgagactgcagaagatcgattacaagcgattaaagaatttacggagttaggctcaggatttaagattgcgatgcgtgatttgaacattcgtggtgctggtaatttgttaggtaaacaacagcacggctttattgatacagttggatttgatttgtacagtcaaatgttagaagaagctgtaaatgaaaaacgtggtattaaggaaccagaatctgaggtgccagaagtcgaagttgatttaaacttggatgcatatttgccaacagaatatattgcaaatgaacaagctaaaattgaaatttataaaaagctacgaaaaactgaaacatttgatcaaattatcgacattaaagatgaattaattgatcgtttcaatgattatcctgttgaagtagcacgtttgcttgatatagtggaaataaaagtacacgcattacattcaggtatcacgttgattaaagataaagggaaaataattgatattcatttatctgtaaaagccactgaaaatattgatggcgaagtgctgttcaaagcaacacaacctttaggtagaacaatgaaggttggtgttcaaaataatgcaatgacaattactttaacgaaacaaaatcaatggcttgatagtttgaagtttttagttaagtgcattgaagaaagtatgagaatcagtgatgaagcataaagatgcatttaatggcgttgtcgtgttaactgctgcattaattgtcattaaaattctgagtgctgtatatcgaattccatatcaaaatatattaggcgatacaggtttgtatgcatatcaacaagtgtatccaattgtagcattaggaatgatattatcgatgaatgccattcctagtgcaattacacaaaatataggaaagtatcatagtgacgaagcatatgcaaaagcagtcgcttatatacaattagttggtatattaatatttattgctatttttgtgtttgcaaacaatattgcacatatgatgggtgatggccatttaacaccaatgattcaagctgcaagtttaagctttatatttataggtatgcttggcgtgttaagaggttattatcaatctgcaaataatatgacagttccggctatttcccaggttatagaacaagttatacgagtaggtattatcattgttactattgttatttttgtagacagaggttggacgatatatgaagcgggaacaattgctattttagcatcaacgataggttttttaggttcttcaatttatttagtagcgcaccgaccttttaagtttaaaatggtaaataacactgcaaagattgtttggaaacagttcgcactttcggttttgattttcgctatcagtcaattaatcgtaattttatggcaagtgattgatagtgttactattattaagtcacttcaagcgatacgcgtgccattcgatgttgccataactgaaaaaggagtctatgaccgtggtgcatcatttattcagatgggattgattgtaactacaacatttagttttgcgctcattcctctgttaagtgacgcaatcaaaatgaataatcaggtacttatgaatcgttatgcaaatgcgtcattaaagattacgattttaataagtacagcagcgggaataggattaattaatttattgcctttaatgaacggtgtgttttttaagacgaatgatttaaccttaacgttaagtgtttatatgattacggtcatttgtgtatcgttaattatgatggatatggctttattacaagcgcaacatgctgtgagacctatttttgttggtatgacggcaggattggttattaaatttatacttaatatcattttgattcgtttaagtggcattattggtgcgagcattagtactgttgtatcattaattatattcggtacgattatccatattgctgtcacgagaaaataccacttacatgcgatgagacgattttttatcaatgttgttttaggtatggtatttatgtcgattgttgttcaatgcgtgttaaacatagtgacaacacacggtagattcactggactcattgaattattatgtgcagcagtattaggtatcattgcattgtttttctatatttttagatttaatgttttgacatataaagagttaacttatttaccatttggttcaaagttgtatcaaattaagaaaggaagacgttgatggcacataccattacgattgttggcttaggaaactatggcattgatgatttgccgctagggatatataaatttttaaagacacaagataaagtttatgcaagaacgttagatcatccagttatagaatcattgcaagatgaattaacatttcagagttttgaccatgtttatgaagcacatgaccaatttgaagatgtctataatgatattgtggcgcaattggttgaagctgctaatgaaaaagatattgtctatgcggttccgggtcatcctagagttgctgagacaactacagtgaaattactggctttagcaaaggacaatactgatatagatgtgaaagttttaggtggtaaaagctttattgatgatgtgtttgaagcagttaatgtagatccaaatgatggcttcacactgttagatgcgacatcattacaagaagtaacacttaatgttagaacgcatacattgattacgcaagtttatagtgcaatggttgctgctaatttgaaaatcactttaatggaacgatatcctgatgattaccctgttcaaattgtcactggtgcacgaagcgatggtgcggataacgttgtgacatgcccattatatgaattggatcatgatgaaaatgcattcaataatttgacgagtgtattcgtaccaaaaatcataacatcgacatatttgtatcatgactttgattttgcaacggaagtgattgatactttagttgatgaagataaaggttgtccatgggataaagtgcaaacgcatgaaacgcttaagcgttatttacttgaagaaacatttgaattgttcgaagctattgacaatgaagatgattggcatatgattgaagagctaggagatattttattacaagtgttattgcatactagtattggtaaaaaagaagggtatatcgacattaaagaagtgattacaagtcttaatgctaaaatgattcgtagacacccacacatatttggtgatgccaatgctgaaactatcgatgacttaaaagaaatttggtctaaggcgaaagatgctgaaggtaaacagccaagagttaaatttgaaaaagtatttgcagagcattttttaaatttatatgagaagacgaaggataagtcatttgatgaggccgcgttaaagcagtggctagaaaaaggggagagtaatacatgagattagataaatatttaaaagtatcacggttaataaagcgacgtacgctagcaaaagaagtaagtgatcaaggtagaattacaataaatggtaatgttgctaaagctggatcggatgttaaagttgaagatgtgctgacgattcgctttggtcaaaaattagtaacagttaaagtaactgcattaaatgaacatgcatctaaagataacgcaaagggcatgtatgaaatcattgaagagcgtcgacttgaagaagcgtaaattggaggtgacaagcaatgaaaaataaagtagaacatatagaaaatcagtacacgtcgcaagagaacaagaaaaaacaacgtcaaaaaatgaaaatgcgtgttgttcgtaggcgtattacagtatttgcgggcgtattacttgcgataattgttgttttatcaatcttgcttgttgtccaaaaacatcgcaatgatatcgatgcacaggagcgaaaagcgaaagaagcacagtttcaaaagcaacaaaatgaagaaattgcgttaaaagaaaagttgaataatctgaatgacaaagattatattgaaaaaattgcgcgtgatgattattacttaagcaacaaaggtgaagtgatttttaggttgccagaagacaaagattcgtctagctcaaaatcttcgaaaaaataaatccaaattgattcaaaattatccgagtatagacattgtgaaaaaatccaaacaaggatataataagggaaaatcgaatcaaatcgggaggatttatttaacatatgtcaatcgaagttggaaataagcttaaaggtaaagtcactggtattaaaaagtttggtgcattcgtagaattacctgaaggaaaaagtggtttagttcacattagtgaagtcgcagataattatgttgaaaacgtagaagagcacctttctgttggtgatgaagtagacgtaaaagtattatctattgctgatgatggaaaaattagtctttcaattaagaaagctaaagaccgtccacgtagacaacatacgagtaaaccaagtcatcaaaaaccagtgcaaaaagccgaagattttgaaaagaaattaagcaatttcttaaaagatagtgaagataaattaacttcaatcaaacgtcaaacagaatctagacgcggtggcaaaggttcaagacgttaattaaaataaataaagactgtttcgataaggaatatatttagaatgatgcgtatcgaataatcgattgcagcgttagacaatctaagactgtttcttaaataaggagcagtctcttttatttgtaatgatataactaaggcttataccatttttgaaaattgtaaaagtgaggtgatgttatgcagttaaatagtaatggttggcatgttgatgaccatattgttgtcgctgtttctacaggtattgatagtatgtgtttattgtatcaactactaaatgattataaagataattatagaaaactaacatgcttacatgtcaatcatggcgttaggtcagcttcaatcgaggaagccagatttttagaagcatactgcgaacgtcatcacatcgatttacatatcaaaaagttagatttgtcgcatagtctcgaccgaaataacagcattcagaatgaagctcgaattaaacgttacgaatggtttgatgaaatgatgaatgtattagaagcggatgtattgctaacggcgcatcatttggacgatcaattagaaactattatgtatcgtatttttaatgggaaatcgacgcgtaataaactaggatttgatgagttatcgaagcgaaaaggttatcagatttatcgaccacttttagctgtctctaaaaaagaaataaaacaattccaagagagatatcatattccatattttgaagatgaatctaataaagataacaaatatgttagaaatgatattcgtaatagaattattccagctattgatgaaaataatcaacttaaagtatcgcatttattaaaattaaaacaatggcatgatgaacaatatgatattttgcaatattcagctaaacaatttattcaagaatttgtgaagtttgatgaaaagtcaaaatatttagaggtttctagacaagcttttaataacttaccaaactcattaaagatggttgtgttggattgcctattatcaaagtattatgagttgtttaatattagtgctaaaacatacgaagagtggtttaaacaatttagtagtaagaaagcacaattcagtattaatctcacggataaatggataattcaaatcgcatatggtaaattaataataatggctaaaaataatggcgatacatattttagagttcaaactattgaaaagccaggtaattatatttttaacaaatatcgattagagatacattctaatttaccaaaatgtttatttccgcttacagtgagaacacgacaaagtggcgatacatttaaactgaatgggcgcgatggttataagaaagtgaatcgcctgtttatagattgtaaagtgcaacagtgggttcgggatcaaatgccaatcgtattggataaacaacagcgcattattgcggtaggagatttatatcaacaacaaacaataaaacaatggattataattagtaaaaatggagatgaatagcgttatgcataatgatttgaaagaagtattgttaactgaagaagatattcaaaatatctgtaaggaattgggagcacaattaacaaaggattatcaaggtaaaccattagtatgcgtgggtatcttaaaaggctcagcaatgtttatgtcagatttaattaaacgaattgatacccatttatcaattgatttcatggatgtttctagttatcacggaggcactgagtcaactggtgaagttcaaatcattaaagatttaggttcttctattgaaaataaagacgtattaattattgaagatatcttagagactggtactacacttaagtcaattactgaattattacaatctagaaaagttaattcattagaaatagttactttattagataaaccaaaccgtcgtaaagcggacattgaagctaagtatgtaggtaaaaaaataccagatgaatttgttgttggttacggtttagattatcgtgaattataccgaaacttaccatatatcggtacgttaaaacctgaagtgtattcaaattaattttttaatcaatttcagttattattactatgcgtttgagaaataatagtgtagactcaaaaatatgaaaaatgtatttcatatatatttaattttagacaagacatatgtcttgaaaagttgaaaaatatagagattgataaaactaatacggatgtgaatggcattgatgttaagctcaattactagcttataaaacatgtcatatgttacaatttttgttagttttattatgggaagtaggaggaaatgacgcatgcagaaagcttttcgcaatgtgctagttatcgtaataataggcgttattatttttggtctattttcatatttaaacggtaatggaaatatgccgaaacagcttacatataatcaatttactgagaagttggaaaaaggtgaccttaaaactttagaaatccaaccacaacaaaatgtctatatggtaagtggtaaaacgaaaaatgatgaagactattcatcaactattttatataacaacgaaaaagaattacaaaaaattactgatgctgctaaaaagcaaaacggtgtaaaattaacgattaaagaagaagaaaaacaaagtgtctttgtgagtatactttcaacattaattccagttgtagtcatagcgttattatttattttcttcctaagccaagcacaaggtggcggtagtggcggtcgtatgatgaactttggtaaatctaaagcgaaaatgtacgataataacaaacgtcgtgttcgtttctctgatgtagcaggggcagatgaagaaaaacaagaattaattgaaattgttgatttcttgaaagataataaaaaattcaaagaaatgggatctaggattcctaaaggtgtcttacttgttggacctccaggtactggtaaaacattacttgctagagcggttgcaggtgaagctggcgcaccattcttctctattagtggttcagactttgtagagatgtttgttggtgttggtgcgagccgtgttcgtgacttattcgataatgctaagaaaaacgcgccttgtattatctttatcgatgagattgatgctgttggtcgtcaacgtggtgcaggtgttggtggcggtcatgatgaacgtgaacaaaccctaaaccaattattagttgaaatggatggattcggtgaaaatgaaggtatcattatgatagctgctacaaaccgtcctgatatccttgacccagccttattacgtccaggtcgttttgatagacaaattcaagttggtcgtccagatgtgaaaggccgtgaagcaattcttcatgttcatgctaaaaacaaaccacttgatgaaacggttgatttaaaagcaatttcacaacgtacacctggtttctcaggtgctgatttagagaacttattaaatgaagcatctttaattgctgtacgtgaaggtaaaaagaaaattgacatgagagatatcgaagaggcaacggatagagttatagccggacctgctaagaaatctcgagttatttctaagaaagaacgtaatattgttgctcatcacgaagctggtcatacaattatcggtatggtacttgatgaggcagaagtagtgcataaagttactattgttccacgtggacaagcaggtggttatgcaatgatgctacctaaacaagatcgtttcttaatgactgaacaagagttattagataaaatctgtggtttacttggtggacgtgtatcagaagatattaactttaacgaagtatcaacaggtgcttcaaatgacttcgaacgtgcaacacaaatcgcacgctcaatggttacgcaatatggtatgagtaaaaaattaggaccattacagttcggtcatagcaatggtcaagtattcttaggtaaagatatgcaaggtgagcctaattattcaagccaaatcgcatatgaaattgataaagaagttcaacgaatcgttaaagaacaatacgaacgttgtaaacaaattttattagagcacaaagaacaattaattttaattgctgaaacattattaacagaagaaacattagttgctgaacaaattcaatcattattctacgaaggtaaattacctgaaattgattatgatgcagctaaagttgttaaagatgaagattctgaatttaatgatggtaaattcggtaaatcttatgaagagattcgtaaagagcaattagaagatggacaacgtgacgaaagtgaagatcgtaaagaagaaaaagatattgctgaggataaaaaagaagctgataaatctgatgaaaaagatgaaccagcacatcgacaagccccaaatatcgaaaaaccttacgatccaaatcacccagacaataaataatcgattatattcagtacctctttctatgataaagttatagaaagaggtacttttatcgtttttaaaaatacgtattagattttaagtcattgaattgttatagcagaaaataattgtaaaacaagttacttcattatttagaatgatgggtgtagaataagtacaattgttgcattttatgaagtaaagtaattttaaaatatagagtaatagaggagattgaaataatgacacacgattatattgttaaagcattagcatttgatggggagattagggcttatgctgctttgacaactgaaactgttcaagaagcacaaacgagacattatacatggccgacagcatctgctgcaatgggaagaacaatgacagcaacagctatgatgggcgcaatgttgaaaggtgatcaaaaattaactgtcactgtagatggccaaggacctattggacgaattattgccgatgcaaatgctaaaggcgaggtgcgtgcttatgtagaccatccacaaactcattttccattaaatgagcaaggtaaacttgatgtaagacgagcagtagggacaaatggatctattatggttgttaaagacgttggaatgaaagactatttctctggagcaagtccaattgtttcaggagaacttggtgaagattttacttattattatgctacaagtgaacaaacaccttcatcggtaggtcttggtgtattggtaaatcctgataatacgattaaagcagcaggaggatttatcattcaagttatgccaggtgccaaagatgaaacaatttcaaaattagaaaaagcaattagtgaaatgacaccagtttctaaattaattgaacaaggattaacgccagaaggattactaaacgaaatcttaggtgaagaccatgtgcaaattttagagaaaatgcctgttcaatttgaatgtaattgtagtcatgagaaatttttaaatgctattaaaggattgggcgaggctgagattcaaaatatgattaaagaagatcatggtgctgaagcagtatgtcatttctgtggaaataaatataaatatactgaagaagaattaaacgtgttgctagaaagtttagcgtaatttaatttaaatcaatacgctaaaatgtttatttttagcggtttagtgaaatgtagaactaaatagttgtataatccttagtgattttgtttgctttctagaatttatttgataaaataattctatatccgataaataaactaagatttcaacaactaactaaaaaggagtgttcttaatggcacaaaaaccagtagataatattactcaaattattggcggtacaccggtagtcaaattgagaaatgtagtagatgacaatgcagcagatgtttatgtaaaattggaatatcaaaatccaggtggttctgtaaaggatagaattgctttagcaatgattgaaaaagcagagcgagaaggcaaaattaaacctggcgatacaattgtagaaccaacaagtggtaatacaggtatcggtttagcatttgtatgtgctgctaaaggatataaagcagtatttactatgcccgaaacaatgagccaagagcgtcgtaatttattaaaagcatacggtgcggaattagttttaacgcctggatcagaagcgatgaaaggtgcaattaaaaaagctaaagaattgaaagaagaacatggttacttcgagccacaacaatttgaaaaccctgcgaaccctgaagttcatgagttaactacaggtcctgagttattacaacaatttgaagggaaaactatcgatgcgttcctagctggtgttggtactggtggtacgttatctggtgtaggtaaagttctgaaaaaagaatatcctaacatcgaaattgttgctatagagcctgaggcttctccagtattgagcggtggtgagccaggtccacataaattacaaggtttaggtgctggatttattccaggcactttgaatacagaaatctatgacagtattattaaagtaggaaatgatacagcgatggaaatgtctcgtcgagttgctaaagaggaaggtattttagcaggtatttcatcaggtgctgcgatttatgctgccattcaaaaagcaaaagaattaggaaaaggtaaaacagtagtaacagtattgccgagtaatggtgaacgctacttatcaacacctttatattcattcgatgactaattaatgtcatttaaaagagtgagttatctttttgagataacttgctctttttttctaccatgtatatttttaaaaatatgagcgttaaattaaacatttttctgataaaaatatccagtgaatgataagataataaacgtacatactaataactagtaaatagcaggagtaaattttattagagttaaacaatacataattaaagggtggttaacatgactaaaacaaaaattatgggcatattaaacgtcacacctgattcattctcagatggtggaaaatttaataatgttgaatcagctataaatagagtgaaagccatgatagatgaaggtgctgacattatagatgttggaggtgtttcaacgagaccaggtcatgaaatggtttcattagaagaagagatgaacagagtattacctgttgttgaagctattgtcggttttgatgtaaaaatttcagtcgatacatttcgaagtgaggttgctgaagcatgtttaaaattaggcgttgatatcattaatgatcaatgggctgggctgtatgatcatcatatgttccaaattgtagctaaatatgacgcggaaattattttaatgcataatggaaatggtaatcgtgatgaaccggttgtcgaagaaatgttaacatctttgttagcacaagcacatcaagctaaaatagctggtataccttcaaataaaatttggctagatccaggtataggtttcgctaaaactagaaatgaagaagccgaagttatggcaagactggatgaacttgttgcaacagaatatccagttttattagcgacaagccggaaacgtttcactaaagagatgatgggttatgatacaacaccggttgaaagagatgaagtaactgcagctacgactgcatatggtattatgaaaggcgttagagcagtacgcgttcataatgtcgagttgaatgctaaattagctaaaggtatagattttttaaaggagaatgaaaatgcaagacacaatctttcttaaaggtatgcgcttttatggatatcatggtgctttatcagctgaaaatgaaatagggcaaattttcaaagtggatgtaactttgaaagtagacttagctgaagctgggcgtactgataatgttattgatacagttcattatggtgaagtgttcgaagaggttaaatcaattatggaaggtaaggccgttaatttacttgagcatctagctgaacgtattgcaaatcgtataaattcacaatataatcgtgtaatggaaacgaaagtgagaatcactaaagaaaacccaccgattccgggtcattatgatggagtaggtatcgaaatagtgagggagaataaatgattcaagcatacttaggattaggtagtaatattggtgatagagaaagccagttaaacgatgctataaagattttgaatgaatatgatggtattaacgtatctaatatttctccgatttatgaaacagcaccagttgggtatactgagcaacctaactttttaaatttgtgtgttgaaattcaaacaacactcacagtattacaactgttggaatgttgtttgaagacagaagaatgtttacaccgtattagaaaggaacgatggggtcctagaactttagatgtggatattttgttgtatggagaagaaatgatagatttaccaaaactgtcggtgccacatccgagaatgaatgaacgtgcatttgttttaatcccattaaatgatatagcagcaaatgtcgtagaaccacgttcgaaattgaaagtgaaagatttagtttttgtcgatgacagtgtaaagagatataaataatgcattgttgagaacattcatatttattgggaatagatgattgattattggagatgtttccgcattttgattatctctaaatgcatttgatttcgaattagtatatgatgatttagtatgtgttagaattaagttatttcataaaatcaaagtaagcaatatttgataaattgctgtaatttatttgggcttttgttgaagtttgtggaagataatttttatacatttacttagggttgtattaatgataatcatattttaaatgaataagtaattcataaacgaaaacagaaattgctttattacatttacaagctcttgtaaaattaaaaaagtgataaaattgatgttatgaatataagaaaacatgccacatcataactttaaggtgtaatggttaatgataaagtattagaaacatcgaaagagatgtatgttgagcaaaaatgtctgatattttataaaactttaaaggaaaatgtttgagtgtaccagttggaatactaaaggattacaacaagttaaaggagagaaagttatgtcagaagaaatgaatgaccaaatgttggttcgacgtcaaaaattacaagaattatatgatcttggtatagacccgtttggttctaaatttgaccgttcaggtttatctagtgatttgaaagaagagtgggaccagtattctaaagaagaattggtagaaaaagaagcggatagtcatgtcgctatagctggacgattaatgactaagcgtggtaaaggtaaagcaggatttgcacacgttcaggacttagctggacaaattcaaatttacgttcgtaaagatcaagttggcgatgacgaatttgatttatggaaaaatgctgatttaggcgatatcgttggtgttgaaggtgtaatgttcaaaacaaatactggcgaattatcggttaaagcgaagaaattcacgctactaactaaatcattgcgaccattaccggataaattccacggtttacaggatattgaacagagatatcgtcaaagatatttagatttaattacgaacgaagatagcactcgtacatttattaatcgtagtaaaatcattcaagaaatgcgtaattatttaaataataaaggtttcttggaagtagaaacacctatgatgcaccaaattgctggtggagcagctgctagaccatttgtaacacatcataatgcattagatgcaacgttatacatgcgtattgctattgagttgcatttaaaacgtttaattgtcggtggacttgaaaaagtatatgaaattggtagagtattccgtaatgaaggtgtatcaactagacataaccctgaattcacaatgattgaattatatgaagcatatgcagattatcatgacattatggatttaacagaatctatggtgagacatattgccaatgaagtattaggttctgcaaaagtacaatacaatggggaaacgattgatttagaatctgcttggactcgtttgcatattgttgatgctgtaaaagaagctactggtgtggatttttatgaagttaaaagtgatgaagaagctaaagctttagctaaagaacatggtattgaaattaaagatacaatgaaatatggtcatattttaaatgaattctttgagcaaaaagttgaagaaacacttattcagccaacgtttatctatggtcatccgactgaaatttcacctttagcgaagaaaaatcctgaagatcctagatttactgatcgtttcgaattgttcattgtaggtagagagcatgcaaatgcatttactgaattaaatgatcctattgatcaaaaaggtcgttttgaagcgcaacttgttgaaaaagcgcaaggtaatgatgaagcgcatgaaatggatgaagattacattgaagcgttagaatatggtatgcctccgacaggtggtcttggtatcggtattgacagattggttatgttattaactgattctccatcaatcagagacgtgttattattcccttatatgagacaaaaataaatgacgttgattgttagtaagagctctcgtgtatacaacatgtgtatgcgagggttttcttaattatggtaattagttcgtgtttgaatgtttttgatagtaatagttaacgatagacattgagatatcttataacaaaaattgctatattagtataatttatcttaatcagctataaaagtactttaaaattgtatagaatgtgtatggttttgtacatatgtgtatgatagaatactaaaagtgttatgaattagagggcacgagaaatgtcagttttgaagaataaaaaagttgattaaaagtgttgactttatcaattgaatgaagtaatatataaaagtcgtcaaaaacagacgaaacacactaaaagctgatgtgacaaagtttacatcaaagtgtaaaattaactattgcaccttattaattaagcgtgtatcataaataagtaagttattttgtctggtgactatagcaaggaggtcacacctgttcccatgccgaacacagaagttaagctccttagcgtcgatggtagtcgaacttacgttccgctagagtagaacgttgccaggcaaatgacaaatcggagaattagctcagctgggagagcatctgccttacaagcagagggtcggcggttcgaacccgtcattctccaccatttattcttagatatagccggcctagctcaattggtagagcaactgacttgtaatcagtaggttgggggttcaagtcctctggccggcaccatcttttgagccattagctcagctggtagagcatctgacttttaatcagagggtcagaggttcgaatcctctatggctcattacgatttaatttttatatttagcaaaataatgcagaagtagttcagcggtagaatacaaccttgccaaggttggggtcgcgggttcgaatcccgtcttctgctccattatttgccgggtggcggaactggcagacgcacaggacttaaaatcctgcggtgagagatcaccgtaccggttcgattccggtcctcggcaccattttagcgcccgtagctcaattggatagagcgtttgactacggatcaagaggttatgggttcgactcctatcgggcgcgccatttttaaattaattgaataacgggaagtagctcagcttggtagagcacttggtttgggaccaaggggtcgcaggttcgaatcctgtcttcccgattacttcttaaattccattttatgggggcttagctcagctgggagagcgcctgctttgcacgcaggaggtcagcggttcgatcccgctagtctccaccatttattttttacacgatgaacattgaaaactgaatgacaatatgtcaacgttaattccaaaaaacgtaactataagttacaaacattatttagtatttatgagctaatcaaacatcataatttttatggagagtttgatcctggctcaggatgaacgctggcggcgtgcctaatacatgcaagtcgagcgaacggacgagaagcttgcttctctgatgttagcggcggacgggtgagtaacacgtggataacctacctataagactgggataacttcgggaaaccggagctaataccggataatattttgaaccgcatggttcaaaagtgaaagacggtcttgctgtcacttatagatggatccgcgctgcattagctagttggtaaggtaacggcttaccaaggcaacgatgcatagccgacctgagagggtgatcggccacactggaactgagacacggtccagactcctacgggaggcagcagtagggaatcttccgcaatgggcgaaagcctgacggagcaacgccgcgtgagtgatgaaggtcttcggatcgtaaaactctgttattagggaagaacatatgtgtaagtaactgtgcacatcttgacggtacctaatcagaaagccacggctaactacgtgccagcagccgcggtaatacgtaggtggcaagcgttatccggaattattgggcgtaaagcgcgcgtaggcggttttttaagtctgatgtgaaagcccacggctcaaccgtggagggtcattggaaactggaaaacttgagtgcagaagaggaaagtggaattccatgtgtagcggtgaaatgcgcagagatatggaggaacaccagtggcgaaggcgactttctggtctgtaactgacgctgatgtgcgaaagcgtggggatcaaacaggattagataccctggtagtccacgccgtaaacgatgagtgctaagtgttagggggtttccgccccttagtgctgcagctaacgcattaagcactccgcctggggagtacgaccgcaaggttgaaactcaaaggaattgacggggacccgcacaagcggtggagcatgtggtttaattcgaagcaacgcgaagaaccttaccaaatcttgacatcctttgacaactctagagatagagctttccccttcgggggacaaagtgacaggtggtgcatggttgtcgtcagctcgtgtcgtgagatgttgggttaagtcccgcaacgagcgcaacccttaagcttagttgccatcattaagttgggcactctaagttgactgccggtgacaaaccggaggaaggtggggatgacgtcaaatcatcatgccccttatgatttgggctacacacgtgctacaatggacaatacaaagggcagcgaaaccgcgaggtcaagcaaatcccataaagttgttctcagttcggattgtagtctgcaactcgactacatgaagctggaatcgctagtaatcgtagatcagcatgctacggtgaatacgttcccgggtcttgtacacaccgcccgtcacaccacgagagtttgtaacacccgaagccggtggagtaaccttttaggagctagccgtcgaaggtgggacaaatgattggggtgaagtcgtaacaaggtagccgtatcggaaggtgcggctggatcacctcctttctaaggatatattcggaacatcttcttcagaagatgcggaataacgtgacatattgtattcagttttgaatgtttatttaacattcaaatattttttggttaaagtgatattgcttttgaaaataaagcagtatgcgagcgcttgactaaaaagaaattgtacattgaaaactagataagtaagtaaaatatagattttaccaagcaaaaccgagtgaataaagagttttaaataagcttgaattcataagaaataatcgctagtgttcgaaagaacactcacaagattaataacgcgtttcctgtaggatggaaacatagattaagttattaagggcgcacggtggatgccttggcactagaagccgatgaaggacgttactaacgacgatatgctttggggagctgtaagtaagctttgatccagagatttccgaatggggaaacccagcatgagttatgtcatgttatcgatatgtgaatacatagcatatcagaaggcacacccggagaactgaaacatcttagtacccggaggaagagaaagaaaattcgattcccttagtagcggcgagcgaaacgggaagagcccaaaccaacaagcttgcttgttggggttgtaggacactctatacggagttacaaaggacgacattagacgaatcatctggaaagatgaatcaaagaaggtaataatcctgtagtcgaaaatgttgtctctcttgagtggatcctgagtacgacggagcacgtgaaattccgtcggaatctgggaggaccatctcctaaggctaaatactctctagtgaccgatagtgaaccagtaccgtgagggaaaggtgaaaagcaccccggaaggggagtgaaatagaacctgaaaccgtgtgcttacaagtagtcagagcccgttaatgggtgatggcgtgccttttgtagaatgaaccggcgagttacgatttgatgcaaggttaagcagtaaatgtggagccgtagcgaaagcgagtctgaatagggcgtttagtatttggtcgtagacccgaaaccaggtgatctacccttggtcaggttgaagttcaggtaacactgaatggaggaccgaaccgacttacgttgaaaagtgagcggatgaactgagggtagcggagaaattccaatcgaacctggagatagctggttctctccgaaatagctttagggctagcctcaagtgatgattattggaggtagagcactgtttggacgaggggcccctctcgggttaccgaattcagacaaactccgaatgccaattaatttaacttgggagtcagaacatgggtgataaggtccgtgttcgaaagggaaacagcccagaccaccagctaaggtcccaaaatatatgttaagtggaaaaggatgtggcgttgcccagacaactaggatgttggcttagaagcagccatcatttaaagagtgcgtaatagctcactagtcgagtgacactgcgccgaaaatgtaccggggctaaacatattaccgaagctgtggattgtcctttggacaatggtaggagagcgttctaagggcgttgaagcatgatcgtaaggacatgtggagcgcttagaagtgagaatgccggtgtgagtagcgaaagacgggtgagaatcccgtccaccgattgactaaggtttccagaggaaggctcgtccgctctgggttagtcgggtcctaagctgaggccgacaggcgtaggcgatggataacaggttgatattcctgtaccacctataatcgttttaatcgatggggggacgcagtaggataggcgaagcgtgcgattggattgcacgtctaagcagtaaggctgagtattaggcaaatccggtactcgttaaggctgagctgtgatggggagaagacattgtgtcttcgagtcgttgatttcacactgccgagaaaagcctctagatagaaaataggtgcccgtaccgcaaaccgacacaggtagtcaagatgagaattctaaggtgagcgagcgaactctcgttaaggaactcggcaaaatgaccccgtaacttcgggagaaggggtgctctttagggttaacgcccagaagagccgcagtgaataggcccaagcgactgtttatcaaaaacacaggtctctgctaaaccgtaaggtgatgtataggggctgacgcctgcccggtgctggaaggttaagaggagtggttagcttctgcgaagctacgaatcgaagccccagtaaacggcggccgtaactataacggtcctaaggtagcgaaattccttgtcgggtaagttccgacccgcacgaaaggcgtaacgatttgggcactgtctcaacgagagactcggtgaaatcatagtacctgtgaagatgcaggttacccgcgacaggacggaaagaccccgtggagctttactgtagcctgatattgaaattcggcacagcttgtacaggataggtaggagcctttgaaacgtgagcgctagcttacgtggaggcgctggtgggatactaccctagctgtgttggctttctaacccgcaccacttatcgtggtgggagacagtgtcaggcgggcagtttgactggggcggtcgcctcctaaaaggtaacggaggcgctcaaaggttccctcagaatggttggaaatcattcatagagtgtaaaggcataagggagcttgactgcgagacctacaagtcgagcagggtcgaaagacggacttagtgatccggtggttccgcatggaagggccatcgctcaacggataaaagctaccccggggataacaggcttatctcccccaagagttcacatcgacggggaggtttggcacctcgatgtcggctcatcgcatcctggggctgtagtcggtcccaagggttgggctgttcgcccattaaagcggtacgcgagctgggttcagaacgtcgtgagacagttcggtccctatccgtcgtgggcgtaggaaatttgagaggagctgtccttagtacgagaggaccgggatggacatacctctggtgtaccagttgtcgtgccaacggcatagctgggtagctatgtgtggacgggataagtgctgaaagcatctaagcatgaagcccccctcaagatgagatttcccaacttcggttataagatccctcaaagatgatgaggttaataggttcgaggtggaagcatggtgacatgtggagctgacgaatactaatcgatcgaagacttaatcaaaataaatgttttgcgaagcaaaatcacttttacttactatctagttttgaatgtataaattacattcatatgtctggtgactatagcaaggaggtcacacctgttcccatgccgaacacagaagttaacctccttagcgtcgatggtagtcgaacttacgttccgctagagtagaacgttgccaggcaaaaaatggatgcgatgagccgcattgagaccgcaaggtctctttttttatgtctaaaacgtcaaaataaaaagcaaacacaaagaaaaatggcttggcgaagtgaaaacgtttgaatctgacgaaacgagaaaagaacgcaacgagtttagtagagctaaatgagtaagtgagagccgaaggagaggaaagaagcaagcgattgtcacaagtcaagaaaggttcttagcgacgatggtagccaacttacgttccgctagagtagaacgttgccaggcaaaaaatggatgcgatgagccgcattgagaccgcaaggtctcttttttttatgtctaaaacgtcaaaataaaaagcaaacacaaagaaaaatggcttggcgaagtgaaaacgtttgaatctgacgaaacgagaaaagaacgcaacgagtttagtagagctaaatgagtaagtgagagccgaaggagaggaaagaagcaagcgattgtcacaagtcaagaaaggttcttagcgaggatggtagccaacttacgttccgctagagtagaacgttgccaggcaaaaatggatgcgatgagccgcattgagaccgtgaggtctctttttttatgtctaaaacgtcaaaataaaagttaacacaaagaaaatggcttgacgaagtgaaaacgtttgaatctgacgaaacgagaaaagaacgcaacgagtttagtagagctaaatgagtaagtgagagccgaaggagaggaaagaagcaagcgattgtcacaagtcaagaaaggttcttagcgaggatggtagccaacttacgttccgctagagtagaacgttgccaggcaaaaatggatgcgatgagccgcattgagaccgtgaggtctcttttttttatgtctaaaacatcaaaataaaaagcaaacacaaagaaaaatggcttggcgaagtgaaaacgtttgaatctgacgaaacgagaaaagaacgcaacgagtttagtagagctaaatgagtaagtgagagccgaaggagaggaaagaagcaagcgattgtcacaagtcaagaaaggttcttagcgaggatggtagccaacttacgttccgctagagtagaactggaaatgataatttaataatgtacactttcgattgtctaagtatgtacaactttaattttgtgtttatataaatttaaaatgatatcatcgaaaacaaaatattgtataaatagagaagagcagtaagacggtatctaattgaaaataatcttactgctcttttatatactttattgaaatacaaaaaggaaattaattattatacaatagacaagctattgcataagtaacactaacttttatcaaagaagtgttactttataattaatgattttattagagcgtctacatgcggttttaaagcatcatcgtctataccgccaaagcctaatataaatttaggggttttcttatagtcttgatcatcatcaaaattataaacttgtaattttaactttactttgtttgctctatcaagacactcttgtaatgttaatccattttttactgtaattgtaaaatgcatacccgtttcagcaccttgaatatcaagctgctctttgtaaggtttcaatctttttaaaatataggttagttttctacgataaattcgtctcattttatttaaatgcctttcaaaaccaccggaagatataaacgttgcaataaggttttgcatatgaacaggtacagtgttgccttcaatgtgattttgagaatgatattttttcattatagaatagggtaacaccatatatgcaactcgacagctaggaaaaatagactttgaaaatgtactgatataaatcactttttctcctcttgaatatagaccttgaattgctggaatgggtttgccgaaatatctaaactcggaatcataatcatcttctataataaatcgttcttctttttcttgagcccattgtattaattgagttcgcttttttaagtccatcacatatccagttggaaattgatgggaaggcgttatatatactatatttttttgtgatttaataacttcatctacgtttattccattatcttcaacttcaatttgttcatattcaacttgttttttatctaaaatatttttgattggtggataactaggtttttcgataataaatgttgaagtataaagtaaatcgactaattgatttactaattgttcggtagatgagccaattataatttgattaggatcacaaattacaccacgattagtaaataaataaaatgccagttgaaatcttaaatgtaattctccttgaaaatgtcctctacgtaattgatttaaatgatttgtatcataaagatctttggaatactttctgaaaagttctatcgggaaatgtttcgtatctatttcatccaaattaaaagcataatcataagcttcatcactcgcttttggtttatatgaatcatcatcaaaaagagaggggataggttgattgtttaaaattgttaaagattcaatttcggacacaaaatatccagagcgaggtcttgaataaatgtaaccttcgtctaatagaagttgatatgcatgctctacggttgtttggctgatagataaatgtttgcttaattgtcttttagaataaaatttatcgccttctttaaattgaccttcaattatttgtttttttaatttttcataaagttgatggtataaagtgtttttcaattttataactgacctcctaaatttatcttattttgtacctttttaaatatcagtttatacattacaatgtatttaatcaacttgaaaaggggttttatgtataatgagtaaaattattggatcagacagagtcaaaagaggtatggctgaaatgcaaaaaggcggcgttattatggatgtcgttaatgctgagcaagcaagaattgcagaagaagctggcgcggtagcagttatggcattagaacgagtaccttctgatattagagctgctggtggcgttgcacgtatggcaaaccctaaaattgtagaagaagtaatgaatgctgtttctattccagtcatggctaaagcacgtattggtcatatcactgaagcaagagtattagaggcgatgggtgttgactatattgatgaatcagaagtgttaacaccagcagatgaggaatatcacttaagaaaagaccaatttacagtaccatttgtatgtggatgtcgtaatttaggtgaagctgcgcgtagaattggtgaaggtgctgctatgttacgtactaaaggtgaaccaggtacaggtaatattgttgaagctgtaagacatatgagacaagttaattcagaagttagtcgtttgactgtaatgaatgatgatgagattatgacttttgcgaaagatatcggtgcgccttatgaaattttaaaacaaattaaagacaatggtcgtttaccggtagttaactttgcagctggtggcgttgcgactcctcaagatgctgctttaatgatggaattaggtgccgacggtgtattcgttggatcaggtatttttaaatcagaagatccagaaaaatttgctaaagcaattgttcaagcaacaacacattaccaagactatgaactaattggaagattagcaagtgaacttggcactgctatgaaaggtttagatatcaatcaattatcattagaagaacgtatgcaagagcgtggttggtaagatatgaaaataggtgtattagcattacaaggtgcagtacgtgaacatattagacatattgaattaagtggtcatgaaggtattgcagttaaaaaagttgaacaattagaagaaatcgagggcttaatattacctggtggcgagtctacaacgttacgtcgattaatgaatttatatggatttaaagaggctttacaaaattcaactttacctatgtttggtacatgcgcaggattaatagttctagcgcaagatatagttggtgaagaaggataccttaacaagttgaatattactgtacaacgaaactcattcggtagacaagttgacagctttgaaacagaattagatattaaaggtatcgctacagatattgaaggtgtgtttataagagcgccacatattgaaaaagtaggccaaggcgtagatatcctatgtaaggttaatgagaaaattgtagccgtccagcaaggtaaatatttaggcgtatcattccatcctgaattaacagatgactatagagtaactgattactttattaatcatattgtaaaaaaagcatagcttaatgtatgctaaaacaacgaattattgatatttatagatttgttgagaagacaatatctccttcaaacttagctttggaggagttgttttttatttcaaaataaaaaatgataaaaaataaagatatacataagaaaaaaccccttcaaagagactgagaatagtcaaaattttgaaggggttaattcgatgttgatgtatttgttaaataaagaatccagcgattgcagctgaaatgaaagatactagtgttgcaccgaataataatttcaaaccaaagcgggcaactgtatctccttttttgtcattaagtgatttaatcgcacctgaaataataccgatagagctaaagttagcaaatgatactaagaatacagatgtaacaccttttgcgtgttcagataaatcactaagtttaccaagtgcttgcattgctacaaattcgttagataatagttttgtcgccataactgaaccggcttgaactgcatcttgccatggcacaccgactaagaatgcaaatggtgcaaagacaaaaccaattaatgtttggaaatcccaagaaatagcgccacctgaaactgtactaaagatattgcttacaattccatttaatagagcgataatggcaatgtatccgattaacattgcgcctacaatgacagctactttaaatccatctaaaatatattctcctagcatttcgaagaatgattgttgtctttcttcagtttcttcaactaataatttgtcatcttcttcattaactttataagggttaataattgaagcgatgatgaaaccaccaaataagtttaagacaacagccgttacaacatatttaggttcaattaaggtaaagtatgcaccgataattgaagcagaaacagtcgacattgctgaagctgttaatgtgtataaacgttgcttaggtatgtatggtaattgttttttaattgaaataaatacttcagattgtcccaaaattgctgcagcaactgcattgtatgattctaaacgtcccataccattaattttagaaattaagaatcctaaaacattaatgattaaaggtaaaatctttgtgtattgaaggataccgataatcgctgaaataaatacgataggtaataatacactgaagaagaatggtggttgcttaggatcgatatattgaataccaccgaatacaaagttaacaccatctgctgcttttaataataagtagttaaaaccgtttgaaataccaccaataaccttgattcccattgtagttttaagcaagataaatgcaaagataagctgaattgcaagtaaaattcctacatatttccagcgaatatttttcctgtctgagctaaatagaaacgcaagtgctaaaaagaagataattccgataatcccaattagaatatgcatatatttctcattcctttagttttttctacaatctatcatacaataaaatggaagggctaacatcataaatttttgaaaatataaaaacaaattaattgaaaaaggtcaaaataggtcatataatatagtcaaagaaggtcaaaaaggggtgatatacatgcacaatatgtctgacatcatagaacaatacatcaaacgtttatttgaagagtcgaatgaagatgtcgttgaaattcagagagcgaatatcgcacagcgttttgattgcgtaccatcacaattaaattatgtaatcaaaacacgattcactaatgaacatggttatgaaatcgaaagtaaacgtggtggtggtggttacatccgaatcactaaaattgaaaataaagatgcaacaggttatattaatcatttgcttcagctgattggaccttctatttctcaacaacaagcttattatattattgatgggcttttagataaaatgttaataaatgaacgtgaagctaaaatgattcaagcagttattgatagagaaacgctatcaatggatatggtttctagagatattattagagcaaatattttaaaacgtttgttaccagttataaattattactaaatgaaatgaggtgttgaagtgctttgtgaaaattgtcaacttaatgaagcggaattaaaagttaaagttacaagtaaaaataaaacagaagaaaaaatggtgtgtcaaacttgtgctgaggggcaccatccgtggaatcaagctaatgaacagcctgaatatcaagaacatcaagataatttcgaagaagcatttgttgttaagcaaattttacaacatttagctacgaaacatggcattaattttcaagaagtagcgtttaaagaagaaaaacgttgcccatcatgtcatatgactttgaaagatattgcacatgttggtaaatttgggtgtgctaattgttatgcaacatttaaagatgacatcattgatatcgtccgcagagttcaaggtggacaatttgagcacgttggaaagacaccacattcttcacataaaaagatagctttaaagcgaaaaatcgaagaaaagaatgaatatttgaaaaaacttattgaaatccaagattttgaggaagcagccattgttagagatgaaattaaagcactaaaagctgagagtgaggtgcaacatgatgacgcataatattcatgataatatcagccaatggatgaaaagtaatgaagaaacaccaattgttatgtcttctagaattcggttagcgcgtaatttagaaaatcatgtgcatccactaatgtatgctactgaaaatgatggatttagagttataaatgaggtacaagatgccttgccaaattttgaattaatgcgtcttgatcaaatggatcaacaaagtaaaatgaaaatggttgcaaagcatttgattagtcctgaactaataaaacaaccagcagccgcagtattagtgaatgatgatgaatctttaagtgtcatgataaatgaagaggaccatattcgtattcaagctatgggaactgacacgacattacaggctttatataatcaagcttcatcaattgatgatgaattagatcgaagccttgatataagttatgatgaacaacttggttatttaactacatgtcctaccaatataggtactggtatgagagcaagcgtgatgctacatttaccaggtctatctattatgaaaagaatgacacggattgctcaaaccattaatcgttttggatatacaatcagaggtatttacggtgaaggttcgcaagtttatggacatacttatcaagtatccaaccaacttacacttggtaaatctgagttagaaatcatagaaacattaacagaagttgttaatcaaatcattcatgaagaaaaacaaatacgacaaaagttagacacttataatcaattagaaacacaagaccgtgtttttcgctcgctaggtattttacaaaactgtagaatgataactatggaagaggcttcttatagattaagcgaagttaaacttggtatagatttaaattacattgaattacaaaactttaaatttaatgaattgatggtagctatacagtcaccatttttattagatgaagaagatgacaaatctgtaaaagaaaaacgagcagatatactaagagaacatataaagtaggaggtcattatttatgttatttggtagattaactgagcgtgcacagcgcgtattagcacatgcacaagaagaagcaattcgtttaaatcattcaaatataggaacagaacacctattattgggattaatgaaagaacctgaaggaattgctgcaaaagtattagaaagttttaatatcactgaagataaagtaattgaagaagttgaaaaattaatcggacatggtcaagatcatgttggtacattgcattatacacctagagctaaaaaagttattgaattatcgatggatgaagctagaaaattacatcacaattttgttggaacggaacatattttattaggcttgattcgtgaaaatgaaggtgttgcagcaagagtttttgcaaatctagatttaaatattactaaagcacgtgcacaagttgtgaaagctttaggaaaccctgaaatgagtaataaaaatgcacaagctagtaagtcaaataatactccaactttagatagtttagctcgtgacttaacagtcattgccaaagacggtacattagatcctgttataggacgtgataaagaaattacacgtgtaattgaagtattaagtagacgtacgaaaaacaatcctgtacttattggagagccaggtgttggtaaaactgctattgctgaaggtttagcgcaagccatagtgaataatgaggtaccagagacattaaaagataagcgtgttatgtctttagatatgggaacagtagttgcaggtactaaatatcgtggtgaatttgaagagcgtctgaaaaaggttatggaagaaatccaacaagcaggtaatgtcatcctatttattgatgagttgcatactttagttggtgctggtggtgctgaaggtgctatcgatgcttcgaatattttgaaaccggcattagcacgtggtgaattacaatgtattggtgctactacattagatgaatatcgcaaaaatattgaaaaagacgcggctttagaacgtcgtttccaacctgtacaagttgatgaaccttcagtagtagatacagttgctattttaaaaggattaagagatcgttacgaagcacaccatcgtattaatatttcagacgaagctattgaagcagctgttaaattaagtaacagatacgtttcagatcgtttcttaccagataaagcaattgatttaattgatgaagcaagttctaaagtaagacttaagagtcatacgacacctaataatttaaaagaaattgaacaagaaattgaaaaagttaaaaatgaaaaagatgctgcagtacatgctcaagagtttgaaaatgctgctaacctgcgtgataaacaaacaaaacttgaaaagcaatatgaagaagctaaaaatgaatggaagaatgcacaaaatggcatgtcaacttcattgtcagaagaagatattgctgaagttattgcaggatggacaggtatcccattaactaaaatcaatgaaacagaatctgaaaaacttctaagtctagaagatacattacatgagagagttattgggcaaaaagatgctgttaattcaatcagtaaagcggttagacgtgcccgtgcagggttaaaagatcctaaacgaccaattggtagctttatcttccttggaccaactggtgttggtaaaactgaattagctagagctttagctgaatcaatgtttggcgatgatgatgcgatgatccgtgtagacatgagtgaatttatggaaaaacacgcagtgagccgattagttggtgctcctccaggatatgttggtcatgatgatggtggacaattaactgaaaaagttagacgtaaaccatattctgtaattttatttgatgaaattgaaaaagctcatccagatgtatttaatattctattacaagttttagatgatggacatttgacagatacaaaaggacgtacagttgatttcagaaatacaattatcataatgacatcaaacgttggggcacaagaattacaagatcaacgatttgctggattcggtggttcaagtgatggacaagattatgaaacaattcgaaaaacgatgttaaaagaattaaaaaattcattccgtccagaatttttaaaccgtgtagatgatatcattgtattccataaactaacaaaagaagaattaaaagaaattgtaacaatgatggttaataaattaacaaatcgattatctgaacaaaacataaatattattgttactgataaagcgaaagacaaaatcgcagaagaaggatatgatccagaatatggtgcaagaccattaattagagcgatacaaaaaactatcgaagataatttaagtgaattaatattagatggtaatcaaattgaaggtaagaaagttacagtagatcatgatggtaaagagtttaaatatgacattgctgaacaaacttcagaaactaaaacaccatcgcaagcataattataaaacagtccaaaacaaattaaagttttgggctgtttttttagtagcattgaactatagaaattcgtgaaagtatccatcaacgaaacaatctataaaacaatcatcaaaggatagttaagaattatatgtaacaagttaatgagcctacagcgatagcataaaggtatgaatttttataaaggttttttgtttgaagatactagcaacttacgtcaaaataaaataggtctatataatattgtgataaatctagagaaaagagtttactaagaaattattaagattttatctttgaaagataccgactatcaacatgatgtaagtttattttataatattcataaaaaataaatctggtaaaacagtttgcgttagtagtcatgttaaaatacaaacaaatgtaactcacatttaatttgtcataatgggaatgtgcgtttaaaatagatttgttcaaaggaaagtggaggtgcaattttggccaagaaaaaagtgatttttgaatgtatggcttgtggttatcaatctcctaaatggatggggaaatgtcctaattgtggcgcttggaatcaaatggaggaaattgttgaaaaagcagccaatcctaaacatggagttaaaaccaaggaattagcaggtaaagtacaaaaattaaatagtattaaacatgaaacaacgccgagagtgttaacagattcagcagaattcaaccgtgtattaggtggaggtattgtgagcggatcgttagtacttattggtggggatccaggtattggtaagtcaacgttacttttacaaatttgtgcatcgttatctcaaaagaaaaaagtactatatattactggagaagaatcgcttagtcagactaaattacgtgcagagcgattagatgaagattcaagtgaattgcaagtattagctgaaacagatcttgaagttatttatcaaacagtaaaagaagaacaacctgatttattagtagtggattcgattcaaacaatatatcatcctgaaatcagctctgcgccaggttctgtttcacaagttcgtgaaagtacacaaagtttaatgaatattgctaaacaaatgaacattgcaacttttatagtgggtcatgtaacgaaagaaggtcaaattgctggcccaagattgctagaacacatggttgatactgtgctttattttgaaggcgatgaacaccacgcatatcgaattttgcgagctgttaaaaaccgttttggttcaacgaatgaaatgggaatcttcgaaatgaagcaaagtggattaaaaggtgtaaataatccatctgaaatgtttttagaagaacgttcaacaaatgttccaggttcaacaattgttgcaaccatggagggaaccagaccacttttaatagaagttcaagcgctggtaactccaacgacttttaacaatccgagacgaatggcaacagggattgatcataatcgattaagtttgttgatggctgttttggaaaagaaagaaaattatctattacaacaacaagatgcttatatcaaagtagctggcggtgtaaagttaacggagccagcagttgatttaagtgtaattgtagcaactgcatctagctttaaagataaagctgtcgacggattagattgctatattggagaagttggtttaacgggtgaggtacgtcgtgtatctcggatagaacaacgcgtgcaagaggctgcaaaactaggtttcaaacgtgtaattattcctaaaaataatataggcggatggacatatcctgaaggtatacaagtaataggtgtaactactgtacatgaagcattgtcatttgctcttcattcataaaacatcaagaaaggaggacattgtgtgaatatcgttaaactaatggttattattatttacttaattattgggagcgcattaggaataattattattcctgaaattgcaaatgatcttggattacaaaactccagctttttaaaaaatcactatgtagatggcattatcggtagtatttttatgttcttaatttttggtgtatttattagacgagttactaacgctataaaaggtttagaacattttattatgcgtagaagtgctgttgaaatactattcgcaacaataggtttaataatcggattacttatttctgttatggtgtcgtttatattagaatcaattggtaactctatttttaatcatttcattcctgtcataattacgatattactatgttatttcggtttccaatttggccttaaaaaacgagatgaaatgttaatgtttttacctgagaatatagcgcgttccatgtcacaacatactaaaagtgctacgccaaaaattatcgacacaagcgcaattattgatggtcgtattttagaagtcattcgttgcggttttatcgatggcaatattttaattccacaaggtgttattaatgaattacaaattgttgcagattcaaatgacagtgttaaacgtgaaaagggtaaaagaggcttagatattttaaatgaattgtatgatttagactatcctacaaaggttatacatccaactaaaacacatagtgatattgatacgatgttattaaaactagcaaaacaatatcatgcaagtattataacgacagatttcaacctaaataaagtttgtcatgtacatggtattaaagcattaaatgttaatgatttatcagaagcaatcaaacctaatgtacatcaaggtgatcaactgcatattttactgacaaaaatgggtaaggagcctggtcaggcagtaggatatctagatgatggtacgatggtggttgttgataatgctaaaaatcttattggcagtcatgtcaatttagaagtagtcagcttattgcaaacatcttcaggaagaattgtttttgctaaaaaaatcgaagatacagtatcattataaaaactgtagttgacgaaaacaaaatagatattaaaaggtatatgaaatggcgaagtttgtaatttgaagtataactataaataaatgcaaaacatatcagttatcaaaaaatgcaaatagtgctaatatatcattgaaacaagttcattaagtgttaaattttagatattaataaagttattcttatagcaatcaagacatacaaaattagaatcaattttaacgtatttgaatagttaatttgaagtttaatttcacagtacataatattcatttttaagtcgttgaaatgtttatgtagtgcagtcttgattcttagggatagcttttttaaagtgttgaaaaaacaactgctttctatttaaaatttaagcatattacccagggaattatgttatgattaaacaatgaaattattttaaggtcatgttaaaaagcattgtttcgttttaacaataagacgagttagacatttgttatgacggtcgaagatagcaaatgaacaatttatatgaactaacttgaaaatctgatatttaatttaggagtgaaaaaaatgagcgatcgtataagagtaagatatgcaccaagtccaactggttatcttcatattggtaatgcaagaacagcattattcaattacttgtatgctaaacattacaacggagattttgtgattcgaattgaagatactgataaaaaacgtaatttagaagatggagaaacatcacaatttgataatcttaaatggttaggattagattgggatgagtctgtagataaagacaatggctacggaccatatcgtcaatctgaacgtcaacatatctaccaaccattaatagatcagttactagcagaagataaagcatataaatgctatatgacagaagaagaattagaagctgaacgtgaagcacaaatcgctcgtggtgaaatgcctcgctatggtggacaacatgcgcatttgactgaagaacaacgtcaacaatttgaagcagaaggacgccaaccatcaattcgtttccgagtacctcaaaaccaaacgtattcatttgatgatatggtaaaaggaaatatttcatttgattcaaatggtattggtgactgggttatcgtaaaaaaagatggcattccaacgtacaattttgcagtagctatagatgatcattacatgcaaatttcagatgtaattcgtggtgatgatcatatttcaaacacgcctaaacaaattatgatttatgaagcatttggctgggagccacctcgttttggtcatatgtcattaattgttaatgaagaacgtaaaaagttaagtaaacgtgatgggcaaattttacaatttattgagcaatatcgtgacttaggttatttacctgaagcgttatttaattttattgcgttattaggttggtctcctgaaggtgaagaagaaatcttttctaaagaagaatttatcaaaatctttgatgaaaagcgtttgtcaaaatcaccagcatttttcgataagcaaaaattagcatgggttaataaccaatatatgaaacaaaaagatactgaaacagtattccaattagcattacctcatttaattaaagcaaatttgattcctgaggtgccgtcagaagaggatttatcttggggacgcaaattaattgcgctttatcaaaaagaaatgagttatgccggtgaaattgtacctttatcagaaatgttctttaaagaaatgccagctcttggtgaagaagaacaacaagtgattaatggagagcaagtaccagagttaatgacgcacttattcagtaaattagaagcacttgaaccatttgaagcggctgaaattaaaaagacaattaaagaagttcaaaaagaaacaggaataaaaggcaagcaattatttatgcctattcgtgttgctgtaacaggccaaatgcatggtcctgaattaccaaatacaattgaagtacttggtaaagaaaaagtgctaaaccgtttaaaacaatataagtaatgaaatagacaagatcaaggtagtatatacttgaattttataacgtaaccacatatgataaagttgtattaacaaattacaacaatatgaataaagtattttatataaaacgaaggattagtaattaaatttatacgatgcagagagtgtacggttgctgtgagtacaacgtagaaattaatgaatgcaccttcgtaaaatgaattaaatatataatgagagtgatgagcattaagttgacttagtttccttgataatttggaagcgcccgcaatattattaatgttattcgctaaattcagagtggaaccgtgcggaagcgcctctaacaatacaatttgtatgttagtggtgcttttttgatatttaatttcgcaggtacttcaattatgtatttacgtagttcaatcattgaggaggaaatgatcttgttaaaaagaatgagagacgatataaaaatggtatttgagcaggatccagcggcacgttcaacattagaagtcattacaacgtatgcaggtttacatgcagtttggagtcatttgattgcacataagttatacaaccaaaaaaaatatgttgcagcacgcgcgatatctcaaatttcaagatttttcacaggtatagaaatccatccaggtgctaaaattggaaagcgtctatttatagatcatggtatgggcgttgtaataggagaaacatgtacaattggtgataatgtgacaatctatcaaggcgtgacacttggtgggacagggaaagaaagagggaaaagacacccagatataggagacaatgttttaatagcagcgggtgcgaaagttttaggaaatattaaaataaattcaaatgtaaatattggtgcaaattcagttgttttacaatcagttccaagctattcaacggttgttggtataccaggacatattgttaagcaagatggtgttcgagttggaaaaacatttgatcatcgccatctacctgatccaatttatgaacaaattaagcatttagaacgacaacttgaaaagactaggaatggagagattcaagatgattacattatataatacgcttacacgtcaaaaagaagtgttcaagcctatagaaccaggaaaaataaaaatgtatgtatgtggtcctactgtatataactacattcatattggtaacgcaagaccagcaattaattatgacgtagtgagacgttactttgaataccaaggatataatgtagaatatgtatcaaattttacagacgtagatgataaattaattaaacgttctcaagaattaaatcagtctgttcccgaaattgcagaaaaatatatcgcagcttttcatgaagatgttggtgcgttaaatgttagaaaagcgacttcaaatccaagggtaatggaccatatggatgacattattcaatttattaaagatttggtggatcaaggttatgcatatgaaagtggtggcgatgtttactttagaacacgtaaatttgaaggttatggtaaattaagtcatcaatccatagatgacttaaaagtgggtgctcgtatagatgcaggagagcataaagaagatgcacttgattttacattgtggaaaaaagcgaagcctggcgagattagttgggatagcccatttggtgaaggtagaccaggatggcatatagaatgttctgtaatggcatttcatgagctaggacctacaattgatatacatgcgggtggttcagatttacaatttccacatcatgaaaatgaaatagcacaatcagaagcacataatcatgcgccatttgctaattattggatgcataatggtttcattaatattgataatgaaaaaatgagtaaatcactaggcaactttattttagttcacgatattattaaagaagttgatccagatgtactaagattctttatgattagcgtacattatagaagcccaattaactataatctagaattggtagaatcagcacgtagtggactagagcgtattcgcaatagttatcaattaattgaagagcgcgcacaaattgctactaatattgaaaatcaacagacatatattgatcaaattgatgcgattttaaatcgttttgaaacagttatgaatgatgattttaatacagctaatgcaattacagcttggtatgatttagcaaaacttgcgaataaatatgtactagagaacacaacatcaacagaagtaattgataaatttaaagcagtttatcaaattttcagcgatgttttaggtgtaccgttaaaatctaaaaatgcagatgaattattggatgaagatgttgaaaaattaatcgaagagcgtaatgaagcaaggaaaaacaaagattttgcacgagcagatgaaattcgagacatgctgaaatcacaaaacattatattagaagacacacctcaaggggttagatttaaacgtggataatcaacaagataatcacattaaattattgaatccattgaccttagcatatatgggagacgcagtcttagatcaatatgtacgtacctatatcgttttaaagcttaaaagtaagcctaataaactacatcaaatgtctaaaaaatatgtatctgccaaaagtcaggcgcaaacgttagaatatttaatggagcaagaatggtttacagacgaagaaatggatattttgaagcgagggcgtaacgcgaaaagtcatactaaagctaaaaacactgatgttcaaacatatcgtaaaagttcagcgatagaagcagtgataggttttctttatttagaaaaaagagaagaacgattagaggcattattaaataaaataataacaatagtaaacgaaaggtagtgacgatgtggaagatacggttattgttggtaggcatgctgttagagaagcgattattactgggcatccgataaataagatattgattcaagaaggtattaaaaagcaacaaattaatgaaattttaaaaaatgcaaaagatcaaaaaattattgttcaaactgtaccaaaatctaaattagattttttagcaaatgcaccacatcagggtgttgcagcgcttattgcaccatatgaatatgctgacttcgatcaatttttaaaacagcaaaaagaaaaagaaggtttatcgatagtacttatattagacggcttagaagacccgcataacttgggatcaattttaagaacagccgatgcaacgggagttgatggtgttattattcctaaacgtcgttcagttacactaacgcaaacagttgcaaaagcctcaacaggtgcaattgaacatgtaccagttattcgagtgacaaatttagctaaaactatcgatgaactaaaagataatggcttttgggtagctggcactgaagctaataatgcaacagattatagaaatctagaagcggacatgtcattggctattgtaattggtagcgaaggacagggtatgagtcgcctagtaagtgataaatgcgatttttatattaagattccaatggttggacatgtaaacagtttgaatgcttcggttgcagcaagtttaatgatgtacgaagtatttcgaaaaagacatgatgttggagaaatataatgaaagaacgttacttaatcattgatggatacaatatgataggacaatcaccaacgctaagcgccattgcaaaagagaatttagaagaagctagaatgcaattaatagatgcaattgcaaattataatgcagttatttcagatgaaattatttgtgttttcgatgcttatgaccaatcgggtgttgaaagagaatacatgtatcatggcgttaaaacgatttttaccaaggaaaaagaaacagctgatagtttcatagaacgttatgtttatgaactttatgacaagcatactaagcatattacagttgtaacaagtgatatgagtgagcaacatgctatctttggatcaggtgcatatagaatatcatctcgcgaaatgtggagagatttaaaagaaaatgaaattgatgtgagtaaatcattagatgatataagtgaaaacaagccaagaactcgaattccgttatcttctgaaatccttgcagaatttgaaaaaatacgaagaggacatcataagaaatgacatttccgtcatcttgaaattttgaatgtaacaatattaaactaaccttaaattttagatagaaggggttagtttaatacttgaaatacgatttgacaactcaagacagtacaatcaaacgtaacaatgcaataaatgataaagacttcgaaaagttagtaatggatctaaaaccattaattattcgacgcatcaaaacatttggatttaatcattatgatttagaagacttatatcaagaaatacttatacggatgtataggtcggtccaaacatttgattttagtggagagcagcctttcacaaattatgttcaatgtttaattacgtctgtaaagtatgattatttgagaaaatatttagctacaaataaaagaatggataatttgattaatgaatatagagttacgtatccatgtgcaataaagcgttatgatgttgaaaacaattatttgaatcaattagcaattaaagagttgattcgtcagtttaagtatttgagtgcatttgaaaaagatgtcatgtatttaatgtgtgaacaatataagccgagagaaattgctcaactgatgcatgtaaaagagaaagtgatttataatgccatacaacgatgtaaaaataaaataaaacgttatttcaaaacgatttgaaaagcgccttaggacgtgaattgaattagaacgtgttacttactgatggtttgacatttgttataaattttatgtatagtatactggtattataatgaataaaggtgaattattgtgagaaaaatacctttaaattgtgaagcttgtggcaatagaaattataatgttcctaagcaagaaggctcggcaacaagattaaccttaaagaaatattgtccaaaatgtaacgcgcacacaattcataaagaatcgaaataaatacattcgaaataatactttgataatatgttcaaaggatttggaggttgagcagatggctaaaaaagaaagtttctttaaaggcgttaagtctgaaatggaaaaaacaagttggccgacgaaagaagagctatttaaatatactgtaattgtagtttctactgttatattcttcttagtctttttctatgccttagatttaggaattacagcattgaaaaatttattatttggttagaggagtgaagacatgtctgaagaagttggcgcaaagcgttggtatgcagtgcatacatattctggatatgaaaataaagttaaaaagaatttagaaaaaagagtagaatctatgaatatgactgaacaaatctttagagtagtcataccggaagaagaagaaactcaagtaaaagatggcaaagctaaaacgactgttaaaaaaacattccctggatatgttttagtggaattaatcatgacagatgaatcatggtatgtggtaagaaatacaccaggtgttactggttttgtaggttctgcaggtgcagggtctaagccaaatccattgttaccagaagaagttcgcttcatcttaaaacaaatgggtcttaaagaaaagactatcgatgttgaactcgaagttggcgagcaagttcgtattaaatcaggtccatttgcgaatcaagttggtgaagttcaagaaattgaaacagataagtttaagctaacagtattagtagatatgtttggccgagaaacaccagtagaagttgaattcgatcaaatagaaaagctttaattaacaattaaagttattaaactaaccaaaagataaaaaagagtattgattttttaattagaaaagtgttaaaattatgtggtcgcgcttttagagcgcccatttcgtcacgaaatgttaagagtgggagggcaaaactgagccctgtgaccacatcacgatatcaaggaggtgcacatcgtggctaaaaaagtagataaagttgttaaattacaaattcctgcaggtaaagcgaatccagcaccaccagttggtccagcattaggtcaagcaggtgtgaacatcatgggattctgtaaagagttcaatgcacgtactcaagatcaagcaggtttaattattccggtagaaatcagtgtttatgaagatcgttcatttacatttattacaaaaactccaccggctccagtattacttaaaaaagcagctggtattgaaaaaggttcaggcgaaccaaacaaaactaaagttgctacagtaactaaagatcaagtacgcgaaattgctaacagcaaaatgcaagacttaaacgctgctgacgaagaagcagctatgcgtattatcgaaggtactgcacgtagtatgggtatcgttgtagaataattttacgaatattaaatttgattacatgatttaaacgatgaagcagataacagagataataatgatgaattataaatataatctgaatgactagattaatgattgatttattcataagattaattcttctgttgtctgctcttaacttgcatatagcaagtaatgtgggaggaaattccgctaaaaccactaaaggaggaactataaatggctaaaaaaggtaaaaagtatcaagaagcagctagtaaagttgaccgtactcagcactacagtgttgaagaagcaattaaattagctaaagaaacaagtattgctaactttgacgcttctgttgaagttgcattccgtttaggaattgatacacgtaaaaatgaccaacaaatccgtggtgcagttgtattaccaaacggaactggtaaatcacaaagtgtattagtattcgctaaaggtgacaaaattgctgaagctgaagcagcaggtgctgactatgtaggtgaagcagaatacgttcaaaaaatccaacaaggttggttcgacttcgatgtagtagttgctacaccagacatgatgggtgaagttggtaaattaggtcgtgtattaggaccaaaaggtttaatgccaaaccctaaaactggaactgtaacaatggatgttaaaaaagctgttgaagaaatcaaagctggtaaagtagaataccgtgctgaaaaagctggtatcgtacatgcatcaattggtaaagtttcatttactgatgaacaattaattgaaaacttcaatactttacaagatgtattagctaaagctaaaccatcatctgctaaaggtacatacttcaaatctgttgctgtaactacaacaatgggtcctggagttaaaattgatactgcaagtttcaaataataaatgatataaacaattacaggctgaaagaaatatctttcagtctgtaaaaatatattgacaataagtaatttccaagttatattacttattgtgattattttacctaagacagtaggagttatttataacttaaaacttatcctgccgaggctaaaattgacttgaacgtgatgatctatgatctttcaagcactttttgccgtgggtagaaagtgctttttttattaattttaaaaaaagcaccaaaaatttaaatggaggtgtctgaatgtctgctatcattgaagctaaaaaacaactagttgatgaaattgctgaggtactatcaaattcagtttcaacagtaatcgttgactaccgtggattaacagtagctgaagttactgacttacgttcacaattacgtgaagctggtgttgagtataaagtatacaaaaacactatggtacgtcgtgcagctgaaaaagctggtatcgaaggcttagatgaattcttaacaggtcctactgctattgcaacttcaagtgaagatgctgtagctgcagcgaaagtaatttctggatttgctaaagatcatgaagcattagaaattaaatcaggcgttatggaaggcaatgttattacagcagaagaagttaaaactgttggttcattaccttcacacgatggtcttgtatctatgcttttatcagtattacaagctcctgtacgcaacttcgcttatgcggttaaagctattggagaacaaaaagaagaaagcgctgaataatttttagcgtaaaaaaattaaaaataatggaggaattataaaatggctaatcatgaacaaatcattgaagcgattaaagaaatgtcagtattagaattaaacgacttagtaaaagcaattgaagaagaatttggtgtaactgcagctgctccagtagcagtagcaggtgcagctggtggcgctgacgctgcagcagaaaaaactgaatttgacgttgagttaacttcagctggttcatctaaaatcaaagttgttaaagctgttaaagaagcaactggtttaggattaaaagatgctaaagaattagtagacggagctcctaaagtaatcaaagaagctttacctaaagaagaagctgaaaaacttaaagaacaattagaagaagttggagctactgtagaattaaaataattcaagtatcttaaacttaataatcaaagttttatagcaagtattgctataatataatgattctttgagaagttaaaaccccgttattttgataacggggttttattcatttaaagactgagtgaaatgttataattataatgacgagttacaaagtgaagatgaggtggaataatgagtcattattacgatgaagatccaagtgtaattagcaatgaacaacgtattcaatatcaattaaaccatcataaaattgatttaataactgataatggagtgttttcgaaagataaagtagattatggttcagatgttcttgttcaaacttttttaaaagcgcatccacctggtccaagtaagcgaattgccgatgttggttgtggttacggaccaattggtttgatgattgctaaagtatcaccacatcattcaattacaatgctagatgttaatcacagagcgctagccttagttgaaaaaaacaaaaaaataaatggtattgataatgcgatcgtaaaggaaagtgatgctttgtctgctgtggaagacaaaagttttgattttattttaaccaatccaccaataagagcagggaaagaaaccgtgcatcgtatattcgagcaagcattacatagattagactcgaacggtgaactattcgttgtaattcagaagaagcaaggtatgccatctgcaaagaaaagaatgaatgaactttttggaaatgtagaagtggtaaataaagataaaggatattacattctgagaagtataaaagcttgaaatgaaatggatattctgttatagttatataatgtaaaaatttatgttcaataagtgtgtacttttacgttaaatagataagttaattaagaataaatatagaatcgaaaatggtgtcatcattagtgttgccgttttctttttgtctttttattaatatgcttatggtatttagctaaaagcggatcacataatttttgaggggtgaatctgtttggcaggtcaagttgtccaatatggaagacatcgtaaacgtagaaactacgcgagaatttcagaagtattagaattaccaaacttaatagaaattcaaactaaatcttacgagtggttcctaagagaaggtttaatcgaaatgtttagagacatttctccaattgaagattttactggtaatttgtcattagagtttgtggattaccgtttaggagaaccaaaatatgatttagaagaatctaaaaaccgtgacgctacttatgctgcacctcttcgtgtaaaagtgcgtctaatcattaaagaaacaggagaagttaaagaacaagaagtctttatgggtgatttcccattaatgactgatacaggtacgttcgttatcaatggtgcagaacgtgtaatcgtatctcaattagttcgttcaccatccgtttatttcaatgaaaaaatcgacaaaaatggtcgtgaaaactatgatgcaacaattattccaaaccgtggtgcatggttagaatatgaaacagatgctaaagatgttgtatacgtgcgtattgatagaacacgtaaactaccattaacagtattgttacgtgcattaggtttctcaagcgaccaagaaattgttgaccttttaggtgacaatgaatatttacgtaatactttagagaaagacggcactgaaaacactgaacaagcgttattagaaatctatgaacgtttacgtccaggtgaaccaccaactgttgaaaatgctaaaagtctattgtattcacgtttctttgatccaaaacgctatgacttagcaagcgtgggtcgttataaaacaaacaaaaaattacatttaaaacatcgtttatttaatcaaaaattagctgagccaattgtaaatactgaaactggtgaaattgtagttgaagaaggtacagtgcttgatcgtcgtaaaatcgacgaaatcatggatgtacttgaatcaaatgcaaacagcgaagtgtttgaattgcatggtagcgttatagacgagccagtagaaattcaatcaattaaagtatatgttcctaacgatgatgaaggtcgtacgacaactgtaattggtaatgctttccctgactcagaagttaaatgcattacaccagcagatatcattgcttcaatgagttacttctttaacttattaagcggtattggatatacagatgatattgaccatttaggtaaccgtcgtttacgttctgtaggtgaattactacaaaaccaattccgtatcggtttatcaagaatggaaagagttgtacgtgaaagaatgtcaattcaagatactgagtctatcacacctcaacaattaattaatattcgacctgttattgcatctattaaagaattctttggtagctctcaattatcacaattcatggaccaagcaaacccattagctgagttaacgcataaacgtcgtctatcagcattaggacctggtggtttaacacgtgaacgtgctcaaatggaagtacgtgacgttcactactctcactatggccgtatgtgtccaattgaaacacctgagggaccaaacattggattgattaactcattatcaagttatgcacgtgtaaatgaattcggctttattgaaacaccatatcgtaaagttgatttagatacacatgctatcactgatcaaattgactatttaacagctgacgaagaagatagctatgttgtagcacaagcaaactctaaattagatgaaaatggtcgtttcatggatgatgaagttgtatgtcgtttccgtggtaacaacacagttatggctaaagaaaaaatggattatatggatgtatcgccgaagcaagttgtttcagcagcgacagcatgtattccattcttagaaaatgatgactcaaaccgtgcattgatgggtgcgaacatgcaacgtcaagcagtgcctttgatgaatccagaagcaccatttgttggtacaggtatggaacacgttgcagcacgtgattctggtgcggctattacagctaagcacagaggtcgtgttgaacatgttgaatctaatgaaattcttgtacgtcgtctagttgaagagaacggcgttgagcatgaaggtgaattagatcgctatccattagctaaatttaaacgttcaaactcaggtacatgttataaccaacgtccaatcgttgcagttggagatgttgttgagtataacgagattttagcagacggaccatctatggaattaggagaaatggcattaggtagaaacgtagtagttggtttcatgacttgggacggttacaactatgaggatgccgttatcatgagtgaaagacttgtgaaagatgacgtgtatacttctattcatattgaagagtatgaatcagaagcacgtgatactaagttaggacctgaagaaatcacaagagatattcctaatgtttctgaaagtgcacttaagaacttagacgatcgtggtatcgtttatattggtgcagaagtaaaagatggagatattttagttggtaaagtaacgcctaaaggtgtaactgagttaactgccgaagaaagattgttacatgcaatctttggtgaaaaagcacgtgaagttagagatacttcattacgtgtacctcacggcgctggcggtatcgttcttgatgtaaaagtattcaatcgtgaagaaggcgacgatacattatcacctggtgtaaaccaattagtacgtgtatacatcgttcaaaaacgtaaaattcatgttggtgataagatgtgtggtcgacatggtaacaaaggtgtcatttctaagattgttcctgaagaagatatgccttacttaccagacggacgtccgatcgatatcatgttaaaccctcttggtgtaccatctcgtatgaacatcggacaagtattagagctacacttaggtatggctgctaaaaatcttggtattcacgttgcatcacctgtatttgacggtgcaaacgatgacgatgtatggtcaacaattgaagaagctggtatggctcgtgatggtaaaactgtactttatgatggacgtacaggtgaaccattcgataaccgtatttcagtaggtgtaatgtacatgttgaaacttgcgcacatggttgatgataaattacatgcgcgttcaacaggaccatattcacttgttacacaacaaccacttggcggtaaagcgcaattcggtggacaacgtttcggtgagatggaggtatgggcacttgaagcatatggtgctgcatacacattacaagaaatcttaacttacaaatccgatgatacagtaggacgtgtgaaaacatacgaggctattgttaaaggtgaaaacatctctagaccaagtgttccagaatcattccgagtattgatgaaagaattacaaagtttaggtttagatgtaaaagttatggatgagcaagataatgaaatcgaaatgacagacgttgatgacgatgatgttgtagaacgcaaagtagatttacaacaaaatgatgctcctgaaacacaaaaagaagttactgattaatacgcaatttacaaaacaggcaaaaagatactaagctgaattttattgatgattcagtttagtactttaagccattttaaataaatgcaaatcaatcaaatagcacagctaatctaaattgaaggaggtaggctccttgattgatgtaaataatttccattatatgaaaataggattggcttcacctgaaaaaatccgttcttggtcttttggtgaagttaaaaaacctgaaacaatcaactaccgtacattaaaacctgaaaaagatggtctattctgtgaaaggattttcggacctacaaaagactgggaatgtagttgtggtaaatacaaacgtgttcgctacaaaggcatggtctgtgacagatgtggagttgaagtaactaaatctaaagtacgtcgtgaaagaatgggtcacattgaacttgctgctccagtttctcacatttggtatttcaaaggtataccaagccgtatgggattattacttgacatgtcaccaagagcattagaagaagttatttactttgcttcttatgttgttgtagatccaggtccaactggtttagaaaagaaaactttattatctgaagctgaattcagagattattatgataaatacccaggtcaattcgttgcaaaaatgggtgcagaaggtattaaagatttacttgaagagattgatcttgacgaagaacttaaattgttacgcgatgagttggaatcagctactggtcaaagacttactcgtgcaattaaacgtttagaagttgttgaatcattccgtaattcaggtaacaaaccttcatggatgattttagatgtacttccaatcatcccaccagaaattcgtccaatggttcaattagatggtggacgatttgcaacaagtgacttaaacgatttataccgtcgtgtaattaatcgaaataatcgtttgaaacgtttattagatttaggtgcacctggtatcatcgttcaaaacgaaaaacgtatgttacaagaagccgttgacgctttaattgataatggtcgtcgtggtcgtccagttactggcccaggtaaccgtccattaaaatctttatctcatatgttaaaaggtaaacaaggtcgtttccgtcaaaacttacttggtaaacgtgttgactattcaggacgttcagttattgcagtaggtccaagcttgaaaatgtaccaatgtggtttaccaaaagaaatggcacttgaactatttaaaccattcgtaatgaaagaattagttcaacgtgaaattgcaactaacattaaaaatgcgaagagtaaaatcgaacgcatggatgatgaagtttgggacgtattggaagaagtaattagagaacatcctgtattacttaaccgtgcaccaacacttcatagacttggtattcaagcatttgaaccaactttagttgaaggtcgtgcgattcgtctacatccacttgtaacaacagcttataacgctgactttgacggtgaccaaatggcggttcacgttcctttatcaaaagaggcacaagctgaagcaagaatgttgatgttagcagcacaaaacatcttgaaccctaaagatggtaaacctgtagttacaccatcacaagatatggtacttggtaactattaccttactttagaaagaaaagatgcagtaaatacaggcgcaatctttaataatacaaatgaagtattaaaagcatatgcaaatggctttgtacatttacacactagaattggtgtacatgcaagttcgttcaataatccaacatttactgaagaacaaaacaaaaagattcttgctacgtcagtaggtaaaattatattcaatgaaatcattccagattcatttgcttatattaatgaacctacgcaagaaaacttagaaagaaagacaccaaacagatatttcatcgatcctacaactttaggtgaaggtggattaaaagaatactttgaaaatgaagaattaattgaacctttcaacaaaaaattcttaggtaatattattgcagaagtattcaacagatttagcatcactgatacatcaatgatgttagaccgtatgaaagacttaggattcaaattctcatctaaagctggtattacagtaggtgttgctgatatcgtagtattacctgataagcaacaaatacttgatgagcatgaaaaattagtcgacagaattacaaaacaattcaaccgtggtttaatcactgaagaagaaagatataatgcagttgttgaaatttggacagatgcaaaagatcaaattcaaggtgaattgatgcaatcacttgataaaactaacccaatcttcatgatgagtgattcaggtgcccgtggtaacgcatctaactttacacagttagcaggtatgcgtggattgatggccgcaccatctggtaagattatcgaattaccaatcacatcttcattccgtgaaggtttaacagtacttgaatacttcatctcaactcacggtgcacgtaaaggtcttgccgatacagcacttaaaacagctgactcaggatatcttactcgtcgtcttgttgacgtggcacaagatgttattgttcgtgaagaagactgtggtactgatagaggtttattagtttctgatattaaagaaggtacagaaatgattgaaccatttatcgaacgtattgaaggtcgttattctaaagaaacaattcgtcatcctgaaactgatgaaataatcattcgtcctgatgaattaattacacctgaaattgctaagaaaattacagatgctggtattgaacaaatgtatattcgctcagcatttacttgtaacgcacgacatggtgtttgtgaaaaatgttacggtaaaaaccttgctactggtgaaaaagttgaagttggtgaagcagttggtacaattgcagcccaatctatcggtgaaccaggtacacagcttacaatgcgtacattccatacaggtggggtagcaggtagcgatatcacacaaggtcttcctcgtattcaagagattttcgaagcacgtaaccctaaaggtcaagcggtaattacggaaatcgaaggtgtcgtagaagatattaaattagcaaaagatagacaacaagaaattgttgttaaaggtgttaatgaaacaagatcataccttgcttcaggtacttcaagaattattgtagaaatcggtcaaccagttcaacgtggtgaagtattaactgaaggttctattgaacctaagaattacttatctgttgctggattaaacgcgactgaaagctacttattaaaagaagtacaaaaagtttaccgtatgcaaggtgtagaaatcgacgataaacacgttgaggttatggttcgacaaatgttacgtaaagttagaattatcgaagcaggtgatacgaagttattaccaggttcattagttgatattcataactttacagatgcaaatagagaagcatttaaacaccgtaagcgtcctgcaacagctaaaccagtattacttggtattactaaagcatcacttgaaacagaaagtttcttatctgcagcatcattccaagaaacaacaagagttcttacagatgcagcaattaaaggtaagcgtgatgacttattaggtcttaaagaaaacgtaattattggtaagttaattccagctggtactggtatgagacgttatagcgacgtaaaatacgaaaaaacagctaaaccagttgcagaagttgaatctcaaactgaagtaacggaataacaagtatataacagaggctaatgctttagcctcttgttatttttatgtaaattatttgatttaatgttgacgaattctcttgttcaatgttaatatattaaaggttgatgcaagcagaactttggaggataaattattgtctaaggaaaaagttgcacgctttaacaaacaacattttgtagttggtcttaaagaaacgcttaaagcgttaaagaaagatcaagttacatctttgattattgctgaagacgttgaagtatatttaatgactcgcgtgttaagccaaatcaatcagaaaaatatacctgtatcttttttcaaaagcaaacatgctttgggtaaacatgtaggtattaacgtcaatgcgacaatagtagcattgattaaatgagaattagtaagtgttttacttactaaattttatttaacctaaaaatgaaccacctggatgtgtgggattaaaaagtgaagagaggaggacatatcacatgccaactattaaccaattagtacgtaaaccaagacaaagcaaaatcaaaaaatcagattctccagctttaaataaaggtttcaacagtaaaaagaaaaaatttactgacttaaactcaccacaaaaacgtggtgtatgtactcgtgtaggtacaatgacacctaaaaaacctaactcagcgttacgtaaatatgcacgtgtgcgtttatcaaacaacatcgaaattaacgcatacatccctggtatcggccataacttacaagaacacagtgttgtacttgtacgtggtggacgtgtaaaagacttaccaggtgtgcgttaccatattgtacgtggagcacttgatacttcaggtgttgacggacgtagacaaggtcgttcattatacggaactaagaaacctaaaaactaagaatttagtttttaattaaatcttaaacttaaaatatttaatataaggaagggaggatttacattatgcctcgtaaaggatcagtacctaaaagagacgtattaccagatccaattcataactctaagttagtaactaaattaattaacaaaattatgttagatggtaaacgtggaacagcacaaagaattctttattcagcattcgacctagttgaacaacgcagtggtcgtgatgcattagaagtattcgaagaagcaatcaacaacattatgccagtattagaagttaaagctcgtcgtgtaggtggttctaactatcaagtaccagtagaagttcgtccagagcgtcgtactactttaggtttacgttggttagttaactatgcacgtcttcgtggtgaaaaaacgatggaagatcgtttagctaacgaaattttagatgcagcaaataatacaggtggtgccgttaagaaacgtgaggacactcacaaaatggctgaagcaaacaaagcatttgctcactaccgttggtaagataaaagcttttaccctgagtgtgttctatattaatgaattttcattaagcgttcatgcttagggcatcgccatatctatcgtatttattcagtaatataaactggaaggagaaaaaatacatggctagagaattttcattagaaaaaactcgtaatatcggtatcatggctcacattgatgctggtaaaacgactacgactgaacgtattctttattacactggccgtatccacaaaattggtgaaacacacgaaggtgcttcacaaatggactggatggagcaagaacaagaccgtggtattactatcacatctgctgcaacaacagcagcttgggaaggtcaccgtgtaaacattatcgatacacctggacacgtagacttcactgtagaagttgaacgttcattacgtgtacttgacggagcagttacagtacttgatgcacaatcaggtgttgaacctcaaactgaaacagtttggcgtcaggctacaacttatggtgttccacgtatagtatttgtaaacaaaatggacaaattaggtgctaacttcgaatactctgtaagtacattacatgatcgtttacaagctaacgctgctccaatccaattaccaattggtgcggaagacgaattcgaagcaatcattgacttagttgaaatgaaatgtttcaaatatacaaatgatttaggtactgaaattgaagaaattgaaattcctgaagaccacttagatagagctgaagaagctcgtgctagcttaatcgaagcagttgcagaaactagcgacgaattaatggaaaaatatcttggtgacgaagaaatttcagtttctgaattaaaagaagctatccgccaagctactactaacgtagaattctacccagtactttgtggtacagctttcaaaaacaaaggtgttcaattaatgcttgacgctgtaattgattacttaccttcaccactagacgttaaaccaattattggtcaccgtgctagcaaccctgaagaagaagtaatcgcgaaagcagacgattcagctgaattcgctgcattagcgttcaaagttatgactgacccttatgttggtaaattgacattcttccgtgtgtattcaggtacaatgacatctggttcatacgttaagaactctactaaaggtaaacgtgaacgtgtaggtcgtttattacaaatgcacgctaactcacgtcaagaaatcgatactgtatactctggagatatcgctgctgcggtaggtcttaaagatacaggtactggtgatactttatgtggtgagaaaaatgacattatcttggaatcaatggaattcccagagccagttattcacttatcagtagagccaaaatctaaagctgaccaagataaaatgactcaagctttagttaaattacaagaagaagacccaacattccatgcacacactgacgaagaaactggacaagttatcatcggtggtatgggtgagcttcacttagacatcttagtagaccgtatgaagaaagaattcaacgttgaatgtaacgtaggtgctccaatggtttcatatcgtgaaacattcaaatcatctgcacaagttcaaggtaaattctctcgtcaatctggtggtcgtggtcaatacggtgatgttcacattgaattcacaccaaacgaaacaggcgcaggtttcgaattcgaaaacgctatcgttggtggtgtagttcctcgtgaatacattccatcagtagaagctggtcttaaagatgctatggaaaatggtgtcttagcaggttatcctttaattgatgttaaagctaaattatatgatggttcataccatgatgtcgattcatctgaaatggccttcaaaattgctgcatcattagcacttaaagaagctgctaaaaaatgtgatcctgtaatcttagaaccaatgatgaaagtaactattgaaatgcctgaagagtacatgggtgatatcatgggtgacgtaacatctcgtcgtggacgtgttgatggtatggaacctcgtggtaatgcacaagttgttaatgcttatgtaccactttcagaaatgttcggttatgcaacatcattacgttcaaacactcaaggtcgcggtacttacactatgtacttcgatcactatgctgaagttccaaaatcaatcgctgaagatattatcaagaaaaataaaggtgaataatataacttgttttgactagctagcctaggttaaaatacaaggtgagcttaaatgtaagctatcatctttatagtttgattttttggggtgaatgcattataaaagaattgtaaaattctttttgcatcgctataaataatttctcatgatggtgagaaactatcatgagagataaatttaaatattatttttaattagaataggagagattttataatggcaaaagaaaaattcgatcgttctaaagaacatgccaatatcggtactatcggtcacgttgaccatggtaaaacaacattaacagcagcaatcgctactgtattagcaaaaaatggtgactcagttgcacaatcatatgacatgattgacaacgctccagaagaaaaagaacgtggtatcacaatcaatacttctcacattgagtaccaaactgacaaacgtcactacgctcacgttgactgcccaggacacgctgactacgttaaaaacatgatcactggtgctgctcaaatggacggcggtatcttagtagtatctgctgctgacggtccaatgccacaaactcgtgaacacattcttttatcacgtaacgttggtgtaccagcattagtagtattcttaaacaaagttgacatggttgacgatgaagaattattagaattagtagaaatggaagttcgtgacttattaagcgaatatgacttcccaggtgacgatgtacctgtaatcgctggttcagcattaaaagctttagaaggcgatgctcaatacgaagaaaaaatcttagaattaatggaagctgtagatacttacattccaactccagaacgtgattctgacaaaccattcatgatgccagttgaggacgtattctcaatcactggtcgtggtactgttgctacaggccgtgttgaacgtggtcaaatcaaagttggtgaagaagttgaaatcatcggtttacatgacacatctaaaacaactgttacaggtgttgaaatgttccgtaaattattagactacgctgaagctggtgacaacattggtgcattattacgtggtgttgctcgtgaagacgtacaacgtggtcaagtattagctgctcctggttcaattacaccacatactgaattcaaagcagaagtatacgtattatcaaaagacgaaggtggacgtcacactccattcttctcaaactatcgtccacaattctatttccgtactactgacgtaactggtgttgttcacttaccagaaggtactgaaatggtaatgcctggtgataacgttgaaatgacagtagaattaatcgctccaatcgcgattgaagacggtactcgtttctcaatccgtgaaggtggacgtactgtaggatcaggcgttgttactgaaatcattaaataatttctaatttcttagattttatataaaaagaagatccctcaatcgaggggtctttttttaatgtgtaaattttgtaatggctattcgatttagaagaacaataattgatgaaagactgactaataaaacttataactgataatactgtttaaataaaattgttgagtcttggacattgtaaaatgctcccttcaaagttttcattttttcaatgtctactttgaagggagcatttcattagtttatgtctcagattcatatctttcaattaatttaaatgcttaatttgttttaaatacttgctctaattcaatgatttttaaaaatacagctacagcgtattttaatgatttttcatcaatatcaaatttgggattatggtgtggcgctgtaatacctttactttcattaccacaaccagtcagaaagaatgcacctggtcgtactttcaaataatgtgaaaaatcttctccaatcatcattaaatctgattcattaaagcgtacatgtaagtcatttgttgcttctttaataacttgatatgctttctcgttattatggacaggcaaataccctttaatataattcaaatcatagttaatatcatttgctattgctaaaccttgtaaaagcttatccattttgtccattacatgattctgtatatctgaatcgaaagttctaactgtacctttacaaaatgcttgatcaggaataacgctatctgtggtgcctgcttgaatcattccaaatgaaagtacagcttgtttaactggatcgatcgtacgtgaaattattttttgtgcacttaaaatgaactctgccatgattactattgggtcaatggtttcatgaggtttggcaccatgaccgccacgacctttaattgtgacgctaaattcatctggagaggccatgattgcccccgcacgtgaatgaatagttccagtaggataaccactccataaatgtgtaccgtaaattctatctacattttccagacatccagcatctatcatttcttgagaaccacctggcatgatttcttcaccgtactggaatattaatacaacattaccttctaataaatgtttatgttcatctaaaatctctgctacagtaagtaaaattgctgtatgaccatcatgcccacacgcatgcatacatcctggatttttagacttataaggcacatcgtttaattcctcgacaggtaacgcatcaaagtcagctcttaatgcaatggtaggtcctgtgcccaagcctttaaatgtggctttgataccattgcggccgataggagtttcaatatcacaagataactggcttaattggttaacaatataatcatgtgtttgaaattcttcaaaagataactcaggatattggtgtaaataacgtctgagttgaattgttttattttctttattatttgctagttggaaccaatctaacacccttatcactactttctaaaataatgtttatagtataacattttatgaaattatcgtactaaatgattgctttgagatattttatctatgaatgataaggctttcaagttatgtagaattactgtatgataaaggtattaccaaacaatacttaagggggattatatactgtggttcaatcattacatgagtttttagaggaaaatataaattatctaaaagaaaatggtttgtataatgaaatagatacaattgaaggtgcaaacggaccagaaatcaaaatcaatgggaaatcatacattaacttatcttcaaataattatttaggactagcaacaaatgaagatttgaaatcagctgcaaaagcagctattgatacacatggtgtaggtgcaggcgctgttcgtacaatcaatggtacattagatttacacgacgaattagaagaaacactagcaaaatttaaaggaacagaagctgcaatagcttatcagtcaggatttaattgtaatatggctgctatttcagctgtcatgaataaaaatgatgctattttatcagatgagcttaatcatgcatcaattattgatggatgtcgcttatctaaagctaaaattattcgagttaaccattcagacatggatgatttacgtgcgaaagcaaaagaagcagttgaatcaggtcaatacaataaagtgatgtatatcactgatggcgtttttagtatggatggtgatgtggctaaattacctgaaattgtagaaattgcagaagaatttggtttattaacttatgttgacgacgctcatggttcaggtgttatgggtaaaggcgctggtacggttaaacattttggtttacaagataaaatcgatttccaaataggtacgctttctaaagcaattggtgtcgttggcggctatgtagcaggtacaaaagagttaatagattggttaaaagcacaatcacgaccattcttattctctacatcattagcacctggggataccaaagcaataactgaagcagttaaaaagttaatggattcaactgaattacatgataaattatgggacaatgcacaatatttaaaaaatggattgtcaaaattaggatatgatacaggtgagtcagaaactccaattacaccagtaattattggtgatgaaaaaacaactcaagaatttagtaagcgtttaaaagacgaaggtgtctatgtgaaatctatcgttttcccaacagtaccaagaggtacaggacgtgtaagaaatatgcctacagctgcacatacaaaagacatgttagatgaagcaattgcggcttatgaaaaagtaggaaaagaaatgaagttgatttaatatttatttattcccacggcaaatattgtcgtgggctttttttaatgtttagtttattaacagtaagttcttataacaatgtttagtgctccccaaaattgaagtttgaattttaaaagcatcttgtagaatttagttgtattttttacaaagaaattcattttgattatttttgataatgagcattttaatagtaatacatgtttatagtgtgtagtatatgtctatactagtagtaactatatagagaaagtaggaataaactatgtcacaagatgtaaatgaattaagtaagcaaccaacgccagataaagcagaagataacgcatttttcccatcaccatattcccttagtcaatatacagcacctaaaacagattttgatggtgttgaacacaaaggtgcctataaagatggtaaatggaaagtattgatgattgctgctgaagagagatatgtattattggaaaatggaaaaatgttctctacgggtaatcatcctgttgaaatgttattacctttacatcatttaatggaagcaggttttgacgttgatgttgcgacattatctggttatccagttaaattagaattatgggctatgccaactgaagacgaggcagttataagtacttataataaattgaaagaaaaattaaaacagccaaaaaaattagcagatgtgattaaaaatgaattaggacctgattcagactatttatctgtctttatcccaggcggacatgctgcagttgttggtatttctgaaagtgaggacgttcaacaaacattagattgggcattagacaatgaccgctttatagttacattatgtcatggaccagcagcactactttcagcagggcttaacagagaaaaatctccattagaaggatactctgtttgtgtcttccctgactcattagatgaaggtgcaaatattgaaataggttatttacctggacgcttgaaatggttagttgctgatttattaactaaacaaggattaaaagtagttaacgacgatatgacaggaagaacgttaaaagatcgtaaattattaacaggtgacagtcctttagcttcaaatgagttaggaaaattagcagttaatgaaatgttaaatgcaatacaaaataaataattaaatattaattagaggagccccatatgtaaatgtatgagggctctttttttggcaaaatttaagtgatacttgtaaaatagaacctattatgagtatgatttaagaaaacgcttgcaaaactaataaccgcaactagcgatatggaggaaacatgatgtcttatagcattggaattgattatggaacagcttcaggccgtgtgtttttaattaatacaactaacggtcaagtagtatcaaaatttgtgaaaccatatacacatggtgtcattgagagtgaattaaatggtttgaaaataccacatacatatgcacttcaaaatagtaatgattatttagaaattatggaagaaggaatatcatatatagtacgtgaatcaaaaatagatccagtcaatatagtaggtattggtatagactttacttcatctactattatttttactgacgaaaaccttaacccggtacataatttaaaacaatttaaaaacaatccacatgcgtatgtgaaactttggaaacatcatggtgcatataaagaagcagagaaattatatcaaactgctattgaaaataataataagtggttaggccattatggatataatgttagtagtgaatggatgattcccaaaataatggaagtcatgaatcgagcaccagaaattatggaaaaaacggcttatattatggaagcgggcgattggattgtaaataaattaactaataaaaatgtacgctcgaattgtggattaggtttcaaagcattttgggaagaagaaacagggtttcattatgatttatttgataaaatagaccccaaattatcaaaagtaattcaagataaagtatctgcaccggttgttaatattggtgaagtagtagggaaactggacgataaaatggcacagaaattaggattatcaaaagagactatggtaagtccttttattattgatgcccatgctagtttattaggtattgggtctgaaaaagataaagaaatgactatggtgatgggaacaagcacatgccatcttatgttaaatgaaaagcaacatcaagtgccaggtatatcaggttctgtaaaaggagcaattattccagaattatttgcttatgaagcggggcaatcagcagtaggtgatttgtttgagtatgtcgctaagcaagcaccaaagtcatatgtagatgaagcagcaaatagaaatatgactgtatttgaattaatgaatgaaaagataaaacatcaaatgccaggtgaaagtgggctcattgctcttgattggcataatggaaatcgaagtgtattaagtgatagcaatttaacaggttgtatctttggattaactttacaaactaagcatgaggatatttatagagcatatttagaagctacagcatttggtactaagatgattatgcaacagtatcaagattggcatatggaagtagaaaaggtatttgcatgtggcggtatacctaaaaagaatgctgttatgatggatatctatgcgaatgtactgaataaaaaactaattgttatggatagtgagtatgcaccagcaataggcgcagcaatattaggtgcagtcagtggtggcgcacataattcaattaatgatgcagttgatgctatgaaagagccaattttatacgaaattaatccagaagcggaaaaagtacaaaggtatgaaacattatttaaagcttataaggctttacatgatatccatggttataaaaaagctaatataatgaaagatatccagagtttaagagttgagggataaaaaatttaatttgacagtaattagtaatattcaacgctataaattactaaaatcaattaatacaactagaatttccatttacggaaataacagcaacatgtacatgtcatatatacaagaaagcgattttatattataattattatgaaaacgaatattatgtccgcttgtgatggactatagctatatagaagagacaaaggagatatttctatgaaaaaaattatgattactggtgcattaggacaaattggtacagaattagttgttaagtgcagagaaatttatgggacagataatgttcttgctacagatattagggaacctgaagcagactcacctgtacaaaatggaccatttgaaatcttagacgtaacagatcgtgaccgtatgtttgagttagttagggactttgaagcggatagtctaatgcatatggcagcattattatcagcaactgcagagaaaaatccaattctagcttgggatttaaatatgggtggattaatgaatgcattagaagctgcaagaacttataatttgcactttttcacaccaagttcaattggtgcatttggagactcaactcctaaagttaatacgccacaagtaacaattcagcaacctacgacaatgtatggtgtaaataaagtagctggagaattattgtgtcaatactatttcaaacgttttggtgtagatacaagaagtgttagattcccaggtttaatctcgcatgttaaagagccaggtggcggtactacagactatgctgttgaaatatacttcaaagcagtaagagaaggtcattatacaagcttcatagataaaggcacgtatatggatatgatgtatatggatgatgcaattgaagcaattattaaacttatggaagcagacgacgctaaattagaaactagaaacggttataatttgagcgcaatgagttttgatccagagatggtaaaagaagcaattcaagaatactatccaaattttacattagattatgatgttgatcctattagacaaggtatcgctaatagttggccggattctattgatacaagctgttcacgtggcgaatggggatttgatcctaaatatgatttagcgagcatgactaaattaatgttagaagctattgaacaaaaagatactgttaaaaataataactaatcatttccattcactttaatacacggaatgatattttaaattactctttattttaataaactagtgcatgaattctaatattattcattatatatattgaattcgcgagcttagttcattttaaagtaaagagttttttgtatgtaaagtatattagtaaaacacagattacttgtctctgtgaaattaatacgtttatactaaaagatatagtctttctagaaaatctgttaattaattttgaatttttagaaaatttattgaacagcaaaatatggattgttataatttaagttaaacaaattcttatacaatattattaggaggcaatcaccatgtcacaagcagttaaagttgaacgacgagaaacattaaaacaaaaaccaaatacatctcaactaggttttggtaaatattttactgattatatgttgagttatgattatgatgcagataaaggatggcatgatttgaagatagtaccttatggtcctattgaaatttcacctgctgcacaaggtgttcattatggtcaatcggtattcgaaggattaaaagcatataaaagagatggggaagttgcacttttccgtccagaagaaaattttaagcgtcttaataactcgttagcacgattagaaatgcctcaagtagacgaagcagaattgttagaggggctaaaacaattagttgatttagaaagagattggattcctgaaggggaaggtcaatcattatatattcgtccatttgtttttgcaacagaaggggcacttggcgttggtgcatcacatcagtataaattattaattattttatctccttcaggtgcatattatggtggtgaaactttaaaaccaactaaaatctatgtagaagatgaatatgtgcgtgctgttcgtggcggtgtagggtttgcgaaagttgcaggtaactatgcggcaagtttattagcacaaacaaatgcaaataaattaggttatgaccaagtattatggcttgatggtgttgaacagaaatatatcgaagaagttggtagcatgaatattttcttcgttgaaaatggaaaagtaattacaccagagttgaatggcagtattttacctggtattacacgtaaatctattatcgaattagctaaaaacttaggatatgaagtcgaagagcgccgcgtttcaatcgatgaattattcgaatcatatgataaaggtgagttaacagaagtatttggtagtggtactgcagcagttatttcacctgtgggtacattgagatacgaagatcgtgaaatcgttattaataataatgagactggtgaaattactcaaaaattatacgacgtctatactggtattcaaaatggtactttagaagataaaaatggttggagagtcgttgtaccaaaatattaataaaaattgaatataatcatgaaaacaatatgtaaaagttaatcatgactaaaatccctttcaatgaagcgaagcatggtaataaattaagtttacaatgtttattgttaagtattgaaggggatttcacttattattatatttaattcaatatttaaatagaacaatactacgagttcattttcaggggataacgaatatcatagaatcagcataatacgaaataaataaataggagtattgatatcaatggaatggatattatttgataaagatggtacgttaattgaatttgatagaagttgggaaaaaataggggtacgatttgtacaatcattgcttgagactttcccagtacataataaagaagctgctttaagacaactcggtgtcattaaagaatctattgatccaaaatcagtgatgggttcaggatctttacaacaaattatccaggcatttaatgatgtgacgggacaagatacaaccgactggtccaagtcaacaagtcaaaagctggtagatgaacgtattcctgaaattaattgggtagaaggtgttaaagaagcacttatcgatttgaaagcaaaaggctatcaacttggtattgttacgagtgatactaaaaaaggtgtagaacaatttttagcacataccaatgctatctcgttgttcgatttgatcatttctaccgaagcggatgcctatgagaagccaaatcctaaagtattatcgcctttatttgagcaatataatgtagatcctcagaaagtagctatagtaggagacactgctaatgatatgaagacagcaagtaatgcaaatttaggtatggcaataggtgtattaacaggtattgcaacaaaagaagaattacatgaagctgatattattttaaatagtgcggcagatattttagaagctttaaattaaaaagaaagacatagtgtatatgtgaattaatgtattcgatagaattgataatgtaatcgatgatatctatggaatatacattgaatataaacatatacgctatgtctttagtcttttatcgtgtatctacttgtcgatatgtttgaataattcgagcaattttgtctatcataggatttaaagattcggggtccttatggatatcatattcattaatattgatacgtacaactggacatgcattaaagctattaatccaatcgtcatagcgtttaaatagctttttccagtattcagggtctgtattaatttccatttcgcgaccacgttcaataatacgatcaatgacctcatcatagttacattctaaataaatcattacatcaggtttaggaaaataaggtgtcatgaccatggcattaaataagtctgaatatgttttgaaatcttctttactcattgtgccttcttcttcatgcatttttgcaaaaatatcaacatcttcataaattgatcgatcttggacaaagccaccaccatattcaaacatacgcttttgttctttaaaacgttcagctaagaagtaaatttgcaaatggaaactccatcgttcaaaatcgctataaaatttatctaaatatggattatgttcgacattttcaaaagacgttttaaagtttaatttatctgcaagtgcttgcgttagtgttgattttccaacaccaactgtacctgcaatggttataatggcattttgtggaataccgtaattattcattggtaatatctcctatcataggtaatataatatgtaatatatcttcgtaatcttgttcatttttaagaaaatcaatagaagttgtatcgattaaaactacatttgaaccattactttgtaaggactcataatactcacgataatctttttttaactttaacagatattcatcttctatttgatgctcaaaactacggttacgtttagcaattctagattttaacacatcaaggtctgcatctaaaaagataatcatattcggcataatcatatcttcagttaaaatatcataaattttactgaatttctgaaattcaacaggactcaaagtatttttagcaaatatcttatttttatgtatatgataatcactaactacaccttgatttagttgtgttacatcttgaaattgcttatatctattgcataaaaagaacatttcagtttgaaaactccatttagagatatcttcataaaagtctgataaaaatggattttctgtgatgatttctttttcttcataaaaatctaaagtttgacttaatttgtgtgcaagtgaagatttacctacgccaataggaccttcaattgctataaaaggtttgttcatattcacatctccaaatgttaaaatagacattgagtattgtaccataagtgaggtatctggacataaatgacaaatgatatatattttatgacattagcgattgaagaagctaaaaaagcagctcaactaggcgaagtacctataggtgctatcatcactaaagatgatgaagttatcgctagagcacataatttaagagaaacactacaacaaccaacggcgcatgctgaacatattgcaattgaacgtgcagccaaagtgttaggtagttggcgtttagaaggttgcacattatatgtaaccttagaaccatgtgtcatgtgcgcaggaacaattgtaatgagtcgcattccaagagtcgtctatggcgcagatgatcttaaaggtggttgtagtggcagtttaatgaatttattgcaacaatctaattttaatcatcgtgcaattgttgataaaggtctacttaaagaagcatgtagcacattattaacaacattttttaaaaacttaagagccaataagaaatccaccaattagacgatagtacatactaattaaaatttgttagaattacattatatgataaattaatgacaatataaatgttaatagaaaagtatgtgcgctgagtatatattcttatttaagaacaagattttaaatttacgaaacgaggtaacataatgataaaactaatagccactgatatggatggcacgctacttaatgcagcacatgaaatttctcaacctaatattgatgcgattaaatacgctcaagaacaagggataacagttgttatcgcgacaggtcgagcattttatgaagcacaagcaccagttgctgacacagatttaacagtaccatatatttgtttgaatggtgctgaagtacgtgatgaaactttcaatgtaatgagcacttcacaccttaataaatcgttagtacacaaaattacaaatgttttaaaagatgcaggtatttattatcaagtatacacgagtcgtgcgatttatactgaagatccacaaagagatttagacatttacatagatattgctgagcgtgcaggtcaacatgcaaacgttgagcgtattaaaaatggtattcaaagacgcatagataatggtacgttgaaagttgttgataattatgatgctattgaaaacatacctggtgaattaattatgaaaatattagcatttgatggaaatttagaaaaaattgacaaagctagtaaaattttagctgaatctccgaatttagctatatcatcatcttcgagaggaaatatagaaataacgcattcagatgcacaaaaaggtattgcgctagaaacaattgccgaaagattagggattgaaatgaaagatgtcatggcaataggtgacaatttaaatgacttatcaatgttagagaaagttggctatccagttgcgatggaaaatggtgcagaagaagttaaaaaaatagcgaaatatgtcacagatacgaatgaaaatagtggtgttggaaaagctattatgaaattattacgtgaacaacaagtttaataaaaaaagaggggtcaaatatgaaaggattaattattattggcagtgcacaagtgaattcacatacaagtgcactagcaagatacttaactgagcattttaaaacacatgatattgaagcggaaatattcgatttagcagaaaaaccgttaaatcaattagatttttcaggaacaacaccgtctattgatgaaatcaaacaaaatatgaaagatttaaaagagaaagcaatggcggcggactttttaatattaggaacgccaaactatcatggttcatattctggaatattgaaaaatgcattagatcatctaaatatggattattttaaaatgaaacctgtaggcttaataggaaatagtggtggtattgttagttcagagccattgtcacatttaagagtaatcgtcagaagtttactaggcattgctgtaccaactcaaatagcaacacatgattctgattttgctaaaaatgaagatggttcatattacttaaatgatagtgaattccaattacgagcaagattatttgtcgatcaaattgtatcttttgtgaataatagtccatatgaacatttaaaataatattaaaaaatatgtaaatatacattaaaaataggtatgtagcttaaggtatttcattgagaatgcttttaagtcacatgcctattttttgttctaatgcaccaatagtaagcctttgagattactgttgtgagcaatgttattaattaaaataagatgtaatagcgaattgaaaacaagcttagattaaaagtgagttttaaaaatatagataaataatttaaagcaattaaagaaaaaaagtattgaaaattgcaattcttaaactggaattcatattaatatttgtagcaaataacattgtaaaataaagaaaaataattaaagtattgcactttattgaaatttatattacgatagtaatgcagaaatttatatatgcaaaatattatatttatcaaattttgatattttaaaggagtattattaaatgaataataaaaagacagcaacaaatagaaaaggcatgataccaaatcgattaaacaaattttcgataagaaagtattctgtaggtactgcttcaattttagtagggacaacattgatttttgggttaagtggtcatgaagctaaagcggcagaacatacgaatggagaattaaatcaatcaaaaaatgaaacgacaggcacaagtgagaataaaacaactgaaaaagttgatagtcgtcaactaaaagacaatacgcaaactgcaactgcagatcagcctaaagtgacaatgagtgatagtgcaacagttaaagaaactagtagtaacatgcaatcaccacaaaacgctacagctaatcaatctactacacaaactagcaatgtaacaacaaatgataaatcagcaactacatatagtaacgatactagtaaaagcaatttaacgcaggcaaaagacgtttcaactaagcctaaaacaacaactattaaaccaagaacattaaaccgtatggcagtgaatactgttgcagcaccacaacaaggtacaaatgttaatgataaagtacattttaagaatattgatattgcgattgataaaggacatgttaataaagatactggtaaaactgaattttgggcaacttcaagtgatgttttaaaattaaaagcaaattatacaatcgatgattctgttaaagagggcgatacatttacttttaaatatggtcaatatttccgtccaggatcagtaagattaccatcgaaaacacaaaatttatataatgctcaaggtaacattattgctaaaggtatttatgatagtgcaacaaattcaacaacatatacatttacaaactatgttgatcaatatacaaatattagtggtagtattgaacaagtttcatttgccaaacgtgaaaatgcaacaactgataaaactgcttataaaatggaagttacattaggaaacgactcttatagtaaagaagttattgtcgattatggtaataaaaaagcacaaccgcttatttcaagtacaaattatatcaacaatgaagatttgtcacgaaatatgactgcatatgtaaatcaacctaaaaatacatatactaaacaaacgtttgttactaatttaactggatataaatttaatccaaatgcaaaaaacttcaaaatatacgaagtgactaaccaaaatcagtttgtggatagtttcacaccagatacttcaaaacttacagatgttactgatcaattcgatattaattatagtaatgataataaaacagctacagtcgatttaatgaaaggccaaaaaagtagtaataaacaatacatcattcaacaagttgcttatccagataatagttcaacagataatgggaaaattgattatactttagacactgacaaaactaaatatagttggtcaaatagttattcaaatgtgaatggctcatcaactgcaaatggcgatcaaaaaaaatacaatcttggtgattatgtttgggaagatacaaataaagatggtaaacaagatgctaacgaaaagggtattaaaggcgtgtatgtcattcttaaagatagcaatggtaaagaattagatcgtacgacaacagatgaaaatggtaaatatcagttcacaggtttaagcaatggaacatatagtgtagaattttcaacaccagccggttatacaccaacaactgcaaatgcaggtacagatgacgcaatagattctgatggactaactacaacaggtgtcattaaagatgctgacaacatgacattagacagtggattctataaaacaccaaaatacagtttaggtgattatgtttggtatgacagtaataaagatggtaaacaagattcgactgaaaaaggaattaaaggtgttaaagttacattgcaaaatgaaaaaggcgaagtaattggtacaactgaaacagattcaaatggtaaatatcgttttgataatttagatagtggtaaatacaaagttatctttgaaaagcctgctggcttaactcaaacaggtacaaatacaactgaagatgataaagatgctgatggtggcgaagttgacgtaacaattacggatcatgatgatttcacactagataatggctactacgaagaagaaacatcagatagcgactcagattcagacagcgattcagactcagatagcgactcagattctgacagcgattcagactcagatagcgactcagattcagacagcgactcagactcagatagcgactcagactcagacagcgactcagactcagatagcgactcagactcagacagcgactcagattcagatagcgattcagactcagacagcgattcagactcagatagcgactcagactcagatagcgattcagactcagacagcgattcagactcagacagcgactcagactcagatagcgattcagactcagacagtgattcagattcagacagcgattcagaatcagacagtgactcagattcagatagcgattcggactcagatagcgactcagattcagacagcgactcagattcagatagcgattcggactcagacaacgactcagatagcgactcagactcagatagcgattcagactcagatagcgattcagactcagatgcaggtaaacatactccgactaaaccaatgagtacggttaaagatcagcataaaacagctaaagcattaccagaaacaggtagtgaaaataataattcaaataatggcacattattcggtggattattcgcggcattaggatcattattgttattcggtcgtcgtaaaaaacaaaataaataatatgattaacttaaccaggtccatgtggcctggttttttctgtttagaaattcccagatataaaacaaaaaatctttaaggaatagatacaatttaatttgttacagaaatgtaattgtctatgaattagaaaagctaagatattaattttaagggcaaataatactattttttatgataattaaataaagattacaaaactcataaaaatttttatttaaacacgaatgttaaataacgttttacgataaagaaaaataattaaagtattgtgctttatctaaaaatgtaatactatattgatatacatttttgtatttaaaacaattgtattatttaaaaatttgatgaattaggagtaatctaatgctaaacagagaaaataaaacggcaataacaagaaaaggcatggtatccaatcgattaaataaattttcgattagaaagtacacagtgggaacagcatcaattttagtaggtacaacattaatttttggtctggggaaccaagaagcaaaggctgcagaaagtactaataaagaattgaacgaagcgacaacttcagcaagtgataatcaatcgagtgataaagttgatatgcagcaactaaatcaagaagacaatactaaaaatgataatcaaaaagaaatggtatcatctcaaggtaatgaaacgacttcaaatgggaataaattaatagaaaaagaaagtgtacaatctaccactggaaataaagttgaagtttcaactgccaaatcagatgagcaagcttcaccaaaatctacgaatgaagatttaaacactaaacaaactataagtaatcaagaagcgttacaacctgatttgcaagagaataaatcagtggtaaatgttcaaccaactaatgaggaaaacaaaaaggtagatgccaaaactgaatcaactacattaaatgttaaaagtgatgctatcaagagtaatgatgaaactcttgttgataacaatagtaattcaaataatgaaaataatgcagatatcattttgccaaaaagtacagcacctaaacgtttgaatacaagaatgcgtatagcagcagtacagccatcatcaacagaggctaaaaatgttaatgatttaatcacatcaaatacaacattaactgtcgttgatgcagataaaaacaataaaatcgtaccagcacaagattatctagcattaaaatcacaaattaaagttgatgacaaagttaaatcaggtgattatttcacaataaaatactcagatacagtacaagtatatggattgaatccggaagatattaaaaatattggagatattaaagatccaaataatggtgaaacaattgcgactgcaaaacatgatactgcaaataatttaattacatatacatttacagattatgtagatagatttaattctgtacaaatgggaattaattattcaatttatatggatgctgatacaattcctgttagtaaaaacgatgttgagtttaatgttacgataggtaatactacaacaaaaacaactgctaacattcaatatccagattatgtttctagagataataattctataggttcagcatttactgaaactgtttcacatgcaggtaatgcagaagacccgggttactatatacagactgtttatgtaaatccatcggaaaaaactttaacaaatgctaaattaaaagttgaagcttatcataaggattatcctgacaatgtaggtcaaataaataaaaatgtaactaaaattaaaatttatcaagcaccaaaagactatgttttaaacaaaggttatgatgttaatacaaatcaacttatagatgtgactgaacaatttaaagataagattacatacggaactaatgacagtgtaaatgttgattttggtagcattaacaattcttatgtagttatggtggatacaaaatttgaatttacaactagtgaaagtccaacacttgttcaaatggcaactttgacttctgatggaaacagatccgtttctactggcaatgctttaggatttactaataaccaaagtggcggagctggtcaagaagtatataaaattggtaactacgtatgggaagatactaataaaaacggtgttcaagaattaggagaaaaaggcgttggcaatgtaactgtaactgtatttgataataatacaaatacaaaagtaggagaagcagttactaaagaagatgggtcatacttgattccaaacttacctaatggagattaccgtgtagaattttcaaacttaccaaaaggttatgaagtaaccccttcaaaacaaggtaataacgaagaattagattcaaacggcttatcttcagttattacagttaatggcaaagataacttatctgcagacttaggtatttacaaacctaaatacaacttaggtgactatgtctgggaagatacaaataaaaatggtatccaagaccaagatgaaaaaggtatatctggcgtaacggtaacattaaaagatgaaaacggtaacgtgttaaaaacagtaacaacagacgctgatggcaaatataaatttactgatttagataatggtaattataaagttgaatttactacaccagaaggctatacaccgactacagtaacttctggaaatgatactgaaaaagactctaatggtttaacaacaacaggtgttattaatggtgctgataacatgacattagatagtggattctacaaaacaccaaaatataatttaggtaattatgtatgggaagatacaaataaagatggtaagcaggattcaactgaaaaaggtatttcaggcgtaacagttacattgaaaaatgaaaacggtgaagttttacaaacaactaaaacagataaagatggtaaatatcaatttactggattagaaaatggaacttataaagttgaattcgaaacaccatcaggttacacaccaacacaagtaggttcaggaactgatgaaggtatagattcaaatggtacatcaacaacaggtgtcattaaagataaagataacgatactattgactctggtttctacaaaccgacttacaacttaggtgactatgtatgggaagatacaaataaaaacggtgttcaagataaagatgaaaagggtatttcaggtgtaacagttacgttaaaagatgaaaacgacaaagttttaaaaacagttacaacagatgaaaatggtaaatatcaattcactgatttaaacaatggaacttataaagttgaattcgagacaccatcaggttatacaccaacttcagtaacttctggaaatgatactgaaaaagattctaatggtttaacaacaacaggtgtcattaaagatgcagataacatgacattagacagtggtttctataaaacaccaaaatatagtttaggtgattatgtttggtacgacagtaataaagacggcaaacaagattcaactgaaaaaggtatcaaagatgttaaagttactttattaaatgaaaaaggcgaagtaattggaacaactaaaacagatgaaaatggtaaatatcgtttcgataatttagatagcggtaaatacaaagttatttttgaaaagcctgctggcttaacacaaacaggtacaaatacaactgaagatgataaagatgcagatggtggcgaagttgacgtaacaattacggatcatgatgatttcacacttgataacggatacttcgaagaagatacatcagatagcgactcagattcagatagcgattcagattcagatagcgactcagactcagacagcgactcagattcagacagcgactcagactcggatagcgattcagattcagacagtgattcagattcagacagcgattcggattcagacagcgactcagactcggatagcgactcagactcagatagcgactcagattcggatagcgactcagactcagacagcgactcagattcagacagcgactcagacacagatagcgactcagactcagacagcgactcagacagtgattcagactcagatagcgattcagattcagacagcgactcagactcagatagtgactcagattcagatagtgactcagactcagacagtgattcagactcagacagtgattcagactcagatagcgactcagactcagacagcgactcagactcagatagtgactcagattcagatagcgattcggactcagacagtgattcagattcggacagcgactcagactcagacagtgattcagattcagatagcgactcagactcagatagcgactcagattcagacagcgattcagactcagatagtgactcagattcggacagcgattcagactcagatagcgactcagattcagacagtgattcagactcagatgcaggtaagcacacacctgttaaaccaatgagtactactaaagaccatcacaataaagcaaaagcattaccagaaacaggtaatgaaaatagcggctcaaataacgcaacgttatttggcggattattcgcagcattaggatcattattgttattcggtcgtcgtaaaaaacaaaataaataatacagcttataccaggtccgtgaggcctggttttttatttcaaaatttatgaaatgtatcttatgtttgagattaaatagtgcaatttttttaaaaaatataacataaatcaacataaatttaattcatctttacattaaaagtacaaacgaataagaaaagcaattaaacacagtatcaaaccatttaaaacaattgatataaaagacaaacgaataattaaaaattactagaattaatttattcaaaccaaagtgtaaaataacagtcttagataaataaatttatttaaagtattgtgctttatctaaaaatgtattacgatgggaatacaaattttcatatgtaaaaatattaattttttgcaaatattgatattttaaaggagatttatatgattaacagggataataaaaaggcaataacaaaaaagggtatgatttcaaatcgcttaaacaaattttcgattagaaagtatactgtaggaactgcatcgattttagtaggtacgacattgatttttggtctagggaaccaagaagctaaagctgctgaaaacactagtacagaaaatgcaaaacaagatgatgcaacgactagtgataataaagaagtagtgtcggaaactgaaaataattcgacaacagaaaataattcaacaaatccaattaagaaagaaacaaatactgattcacaaccagaagctaaaaaagaatcaacttcatcaagtactcaaaaacagcaaaataacgttacagctacaactgaaactaagcctcaaaacattgaaaaagaaaatgttaaaccttcaactgataaaactgcgacagaagatacatctgttattttagaagagaagaaagcaccaaataatacaaataacgatgtaactacaaaaccatctacaagtgaaattcaaacaaaaccaactacacctcaagaatctacaaatattgaaaattcacaaccgcaaccaacgccttcaaaagtagacaatcaagttacagatgcaactaatccaaaacaaacggtaaatgtatcaaaagaagatcttaaaaatgatcctgaaaaattaaaagaattagttagaagtgaaaataacactaatcattcaactaaaccagttgctacagcaccaacaagtgttgcaccaaaacgattaaatgcgaaaatgcgttttgcagttgcacaaccagcagcagttgcgtcaaataatgtaaatgatttaattacagtgacgaaacagacgatcaaagttggcgatggtaaagataatgtggcagcagcgcatgacggtaaagatattgaatatgatacagagtttacaattgacaataaagtcaaaaaaggcgatacaatgacgattaattatgataagaatgtaattccttcggatttaacagataaaaatgatcctatcgatattactgatccatcaggagaggttattgccaaaggaacatttgataaagcgactaagcaaatcacatatacatttacagattatgtagataaatatgaagatataaaagcacgtttaactttatactcatatattgataagcaagcagtacctaatgaaactagtttgaatttaacgtttgcaacagcaggtaaagaaactagccaaaacgtttctgttgattatcaagacccaatggttcatggtgattcaaacattcaatctatctttacaaagttagatgaaaacaaacaaactattgaacaacaaatttatgttaatcctttgaaaaaaacagcaactaacactaaagttgatatagctggtagtcaagtagatgattatggaaatattaaactaggaaatggtagtaccattattgaccaaaatacagaaataaaagtttataaagttaaccctaatcaacaattgcctcaaagtaatagaatctatgattttagtcaatacgaagatgtaacaagtcaatttgataataaaaaatcatttagtaataatgtagcaacattggattttggtgatattaattcagcctatattatcaaagttgttagtaaatatacacctacatcagatggcgaactagatattgctcaaggtactagtatgagaacaactgataaatatggttattataattatgcaggatattcaaacttcatcgtaacttctaatgactctggcggtggtgacggtactgttaaacctgaagaaaagttatacaaaattggtgactatgtatgggaagacgttgataaagacggtgtccaaggtacagattcgaaagaaaagccaatggcaaacgttttagttacattaacttacccagacggtactacaaaatcagtaagaacagatgctaacggtcattatgaattcggtggtttgaaagacggagaaacttatacagttaaattcgaaacgccagctggatatcttccaacaaaagtaaatggaacaactgatggtgaaaaagactcaaatggtagttctgtaactgttaaaattaatggtaaagatgatatgtctttagacactggtttttataaagaacctaaatataatcttggtgactatgtatgggaagatacaaataaagatggtatccaagatgctaatgaacctggtatcaaagatgttaaggttacattaaaagatagtactggaaaagttattggtacaactactactgatgcctcgggtaaatataaatttacagatttagataatggtaactatacagtagaatttgaaacaccagcaggttacacgccaacggttaaaaatactacagctgatgataaagattctaatggtttaacaacaacaggtgtcattaaagatgcagataatatgacattagacagtggtttctataaaacaccaaaatacagtttaggtgattatgtttggtacgacagtaataaagacggcaaacaagactcaactgaaaaaggtattaaagatgtgacagttacattgcaaaacgaaaaaggcgaagtaattggaacaactaaaacagatgaaaatggtaaatatcgtttcgataatttagatagcggtaaatacaaagttatttttgaaaagcctgctggcttaacacaaacaggtacaaatacaactgaagatgataaagatgcagatggtggcgaagttgacgtaacaattacggatcatgatgatttcacacttgataacggatactacgaagaagaaacatcagatagcgactccgattcggacagcgattcagactcagatagcgactcagattcagacagtgattcagactcagatagtgactcagactcagacagcgactcagattcagatagcgactcagactcagacagcgactcagattcagatagtgactcagactcagatagcgactcagattcagacagcgattcagattcagatagtgactcagactcagatagcgattcagattcagacagcgactcagactcagacagtgattcagattcagatagcgattcagacagcgactcagactcggatagcgactcagactcagacagcgattcagactcggatagcgattcagattcggacagcgactcagactcagacagtgattcagattcagatagcgactcagactcagatagcgactcagactcagacagtgattcagactcagatagcgattcggactcggatgcaggaaaacatacacctgttaaaccaatgagtactactaaagaccatcacaataaagcaaaagcattaccagaaacaggtagtgaaaataacggctcaaataacgcaacgttatttggtggattatttgcagcattaggttcattattgttattcggtcgtcgcaaaaaacaaaacaaataatacaatatgacccaggtccttgtggcctggtttttttataattacacatgcaatagatgtatttttcatataaaataaacaataaagatacggaataaaacttatatgaggcgataatatgaattacattttaggaacaattttagaaagtaaaattacaggtgtagaaaaagcgcaaataaatagattgaagttgttcaaacaacacggcatatcttcaaaatgtgtatatgttaaatggaatccttattcatacacatatgcgaagcaacatcagattgaaaatgatgtatttacaatgtatgactattttcaaaaagcaatcaattataaaaagacaaagcaagttaactggatacagtattgggaaaagtcatgtaggtacacattgaaatttgtggaaaattcaaatgatgtcagaatatatgatgaagagcaatttataatgtatgctcattttttagataaacagtatcatcatttaaactatgtgaattattttgatcataaaagaagaaaagtaaaacgcgaattgtatgatggaagaggctttttaagttgttctcgaattttaggtgaaggacaacggattgtactcgaaaattactatacacctaatggggaaatcgtcatccaaaaatatttcgacgatataaaagggaaaaacacgctcacaaaggttatcttaaatgaagatcagcatcaacaattttttgatacagaagatgaattagttcaatattttctccatcaattatgtaaaaataatgatcaaatcatattagatcgtcctcatgaattaggaaatgttatagcgggattaaatcaaagtattccagttgttgttgtgctccatagtacacatttattcggtaccggtaatggtataaaaagtttttataaaacagtatttaataatttaacacgttataaagcgattgttgtatcaacagaaaagcaatgccaagatatttcacaatatattgaaaataaaataccagttatcaatattccggttggctacgtggcaaatttaaagtatcaatttgacatcaatcaaaaggagaaaaatcatatcatatcaattgctcgcctcgttgaaaataaacaaattaaacatcaaattgaagtgatcaagcaattagtaacaaaacatcccaatattcaattgaatatttatggacatggaaatggtttgtcagaatatcgacaacttgtagaagattatcatttatcggaacatgttaaatttcatggttttaagacgcatattaatgaagagattgctaaagcagaactgatgttatcgacaagtaaaatggaaggttttggcttagcaattttagagtcgctttcagtaggtacaccagtgatcagttatgatgtagattatggtccatcagaactgattcaagatggatttaatggctatttagtacctcaaggtgacatcaatcaaatggttgaaaaggtcgaccaattactaaataatactcaaaaattgcaacagttttcaattaatagcatagaatctgcacaacagtacaatgcaactactatcagtacaaagtggcaaaatattttaaactaagtcaaaagaaaaaagcattttcctagaatcatctatttaacaaacctcgttcatacgaacttacatgtttagttaaatgacataggaaaacgcttttttttataaaaataaaggtgaagtacatttatataagacgaacaaattggtcccattgtttaattaacgacgctttactatattgttgcgcttttgccaaactaccttttgacagtcgttgttgtacttcaggatgatcaatcacatattttactttatcaaatagggcatcttcatcatttttagtaattaaataaccattgaaatcaggcgtaattaattcgttaggtccatatttaatatcataactaataactggaacaccatgtgctaaagattcaagtagcgctaaagagaaaccttccatgttacttgttattaaactcaaataggcatcgctatattcttggtctagattgcttaaaaagccgcgtaagtaaacatgattttccaatccatatttttgtatcaattcatttaattttttactttcagaaccaaaaccatacatatgaagctctatttttgggacatacgatactaagcgtttaattaattcaatttgttgatgtaattgtttttcaggtgaataacgagcaacggaaattaatttaacactgcgctgatctaatgtttggactggtgtatcaattgtttcactatagccgacaggaatattaacaactggaatagtatggttaatacgtttttcaacatctaatttttgctgctcagtagaaacgataattgcacgatatcgagataaattttcaaacatcgctttatatacatttttaaatggcgatgaatctaatgcatcaatatttttaatgtgtgtactgtgaagcacagctactactgggattgactcaggcgttaagttgaaaataggtgctgtgtacacattacggtcactgaaaaataaatccccatgttgatatagttgtttaatgaaaaatgcgcctaattccgtttcattattaaagaaatattgtttgttagcatagtaaacaataattttttgtacttctggtttgccatctttgtaagaaaaatacttttctaattttgtgtcaccttctggattatagaaaaattcacataatgtttgttgtttatcaacaagaatcctactacaacttaaaaagccacgcacatcataaaaatcacgttttacttttcgtctttgactatcaaaatgattcacataatctaatatacgatatttaggatcttgaaaatgggcatacattaagaaacgctcttgatcatatattctaaagtcatgactattttcaacatgttttaaagtataatgacattcatcagtccaatacgacaaccagtcaaatggttcattgcgttctaaatatgttgcttcttggaagaaatcatacatattaatatagtcagaactagtaatataattttgggcatttctatataaatatctattccatgacagaaatacacattgcgctggtcttcccatttctttaaataaatttaaacgattaataattgctttttctatcccagttaaattaacacctaaactattacctacaaaataattcatttacaacaccacttatatctattttttataattatatcacataatatttaattacttcttttaactggatgatgtgtttatttataaaacaacaaattttgatatttataatgatagtagttattcaatcaactacgaccaatatatcattgtagagcttaggatattgatttatgcctcaggcacatcaaatgagaagatttataaaagagatatacaactctagaaggtataataaaaacgcgcaactaatgttacgcgtttgaattaatcatatgatattatttgcgatactttaatttagcgaaagcatcatgttgatggatagactcttcattacgacattcgatatcgaaaccgtctaaccaatcaaatccaactaagtccgcggcaattaaacgaattaagtcttcgacaaaacgtggattttcatatgcacgctctgtcacacgtttttcatcaggacgttttaaaatagggtatagaattgaacttgcattagcttccattgcatctaaaattttatttttatagtcatcaactatgtcttgatctttattaatatatgttttaacagtgacaacaccacgttggttgtgcgctgaatactcacttatttcttttgaacaagggcatagcgttgtgacagttgcttcaatagtaagttctttacgtgtaactttatcaccgtcaattgctaatccataagtgacatcggcattaccaactgctttaatatttgtggttggactatagcgatcaaagaaccatttcccagaaacatcaacgcctgccgcattttgtttcatattcgtttgtaaagtgcgtaacacctgataaagtgtattaaattcaagttcaataccattatcatagtgcttttcaacactttcaattatacggctcatattaatacctttttcgtcttttgttaaacttgttgaaaaactaaatgtgccagctgtttgatactggtcaacaagtacagggtacactaagtttttaataccaacttcttctatttcaaataaaaaatctttatgtgtactttgtaaatctgtcatttcgttcttagtagtaggtttcgtgccttcaataggatctacggaaccaaagtgtttccaacgaccttctcgtgtcgataaatcaaattcagtcatttttttcctccgttaagatttaaagtgatatgtccaatatggttcgactgttaaaaagctgtgttgtttaccatcgatttcaggacttgctaattgttttaaaaatggacctgtttgagaagcatgtgcttcaaatgccttaattttaagttctttaaaatctgtaatatcattttgaatatcaggttctccaagagcttcggttgcatcattactgaacgcaactaaagttaaacgagggcgttcttctttaggcatgcgttcaaccgttcgaattacagcgtctgctgttgcttcgtgatcaggatgtactgcatatccaggataaaatgaaataatcaatgatggatttgtatcatcgattaaagatttaatcataccatctatatgttcgtagggttcaaattcgacagttttgtcacgtaaacccatttttcttaaatcagtaataccaataactttacaagcttcttctagttcacgctcacgaatacttggtaatgattcgcgtgttgcaaatgggggattacctaaatttctgcccatttgtcctagggttaaacatgcatatgttacaggtatgcctttttggatataacttgctaatgtgcctgcagatgagaaggtttcatcatcaggatgtggaaatattactaatacatgtctttcgtcagtcatgttgatgcctcctctataaattaaatggtcgctcactaatttgaagtgctgcagcgagttgaccttcgtaattaaaacctgcaattaaaaattcatcatgttcattgacctcaaaatgcgttagaccttgtacataaacccaaccaccatttgatagtttaagaccaatgcgataaggttctttattaccaccttttagttgtgcatgcgtatatgttacttgtatgtttcttaaaaatgtaccagcattaaaaacacgttgatcgaaatggttcgcataggccccatttgtcgtttcaacatgcagatacacaggtttatgttcaaaagaagcaagtaaatctataacttcttgttctttaattggttccaacacgttcactccttacactatcaatgtgtttatctttctattttactaaaaactattcaataattgtatatgattgctcaattatttataaattaattttcatgaagggtaattactcaggattacgcaatcatacagcattagttttttacttttaaaaatcaaaaatttgttggaatttgaaaagtgttaaacattaaaaatgatgctatattaatggtgtatgaatgaattcataagtttttaaaatgtattaaatttgtggaggcatgtaaacaatgaaagtattaaacttaggatcgaaaaaacaagcatcattctatgttgcatgtgagttatataaagagatggcatttaatcagcactgtaaacttggtttagcaactggtggtacaatgacagatttgtatgagcaacttgttaagttattaaataaaaatcagttaaacgtagacaatgtatccacgtttaatttagacgaatatgtaggtttaaccgcatcacatccgcaaagttatcactattatatggatgacatgcttttcaaacaatatccttattttaatagaaagaacattcatattccaaatggagatgccgatgatatgaatgcggaagcgtcaaaatataatgacgttttagaacaacaaagtcaacgtgatattcaaattttaggtattggagaaaatggtcatattggatttaatgaacctggtacgccgtttgatagtgttactcatatcgttgatttgactgaaagtactattaaggctaatagtcgatattttgaaaacgaagatgatgttccaaagcaagccatttcgatgggacttgctaatattcttcaagccaaacgtatcattttactcgcatttggtgaaaagaaacgtgctgctattacacatttattaaatcaggaaatttctgttgatgttccagccacattacttcacaaacacccgaatgttgagatatatttagacgacgaagcttgcccgaaaaatgttgcgaaaattcatgtcgatgaaatggattgattgcaatgtttaattaagaaatgcctcgggaaaggttccaatagaaagataaaaagcattggaaggatgatttttagtggaattacaattagcaattgatttattaaacaaagaagacgcggctgagttagcaaataaagtaaaagattatgtagatatcgtagaaatcggtacgccaatcatttacaacgaaggtttaccagcagttaaacatatggcagacaacattagtaatgtaaaagtattagcagacatgaaaattatggatgcagctgattatgaagttagccaagcaattaaatttggcgcggatgtaattacaatactaggtgttgcagaagatgcatcaattaaagcagctattgaagaagctcataaaaataataaacaattactagttgatatgattgctgttcaagatttagaaaaacgtgcaaaagaactagatgaaatgggtgcggattatattgcagtacacactggttatgatttacaagcagaagggcaatcaccattagaaagtttaagaaccgttaaatctgttattaaaaattctaaagttgcagtagcaggtggaattaaaccagatacaattaaagaaattgtcgctgaaagtcctgatcttgttattgttggtggcggaatcgcaaatgcagatgatccagtagaagctgcaaaacaatgtcgcgctgcaatcgaaggtaagtaatatggctgaatttagtgactatcaattaattctagatgaattaaagatgactttgtcacatgttgaagcggatgagttttcaacgtttgcatccaaaatactacatgctgaacatatatttgtagctggtaaaggacgttcaggattcgtggcgaatagttttgcaatgcgcttaaatcagctcggcaaacaggcacatgttgttggagaatcaacgacacctgcgattaagtcgaatgatgtatttgtaattatctctggttcaggttccacggaacatttaagattattagcagacaaagcaaaatcagtaggtgctgacatcgtattaattactacaaataaagattctgcaataggcaatctagctgggacgaacatcgttttgcctgcaggtacaaaatatgatgaacaaggctcggcacaaccattaggaagtttgtttgaacaagcatctcaattatttttagatagtgttgtaatgggattgatgactgaaatgaatgttacggaacaaacgatgcaacaaaatcatgctaatttagaataaaataaagatagtcgataatatgatgcctaggcagaaatattatcgattatttttttatttaaataataaattatagtataatatcaataataaacgaataggggtgttaatattgaagtttgacaattatatttttgattttgatggtacgttggcagacacgaaaaaatgtggtgaagtagcaacacaaagtgcatttaaagcatgtggcttaacggaaccatcatctaaagaaataacgcattatatgggaatacctattgaagaatcatttttaaaattagcagaccgaccattagatgaagcagcattagcaaagttaatcgatacatttagacatacatatcaatctattgaaaaggactatatttatgaatttgcgggtataactgaagccattacaagtttgtataaccaagggaaaaaacttttcgtggtgtctagtaagaagagtgatgtattagaaagaaatttatcggctattggattaaatcacttgattaccgaagctgttggatccgatcaagtaagtgcatataaaccaaatcctgaaggcatacacacaattgtgcaacgctacaatttaaatagccaacaaacggtttatattggtgattcaacatttgatgttgagatggcgcaacatgctggtgtaccatctgcagcagtaacatggggagcacatgatgcaaggtcattacttcattcaaatccagattttataatcaatgatccatcagaaattaatacagtattataaaatttgttaaaacagagaataccatggttaaaatgcatattcataaatattagattatacttagaaatatttcgctttagattaggaatttaaaataaatatttattaaacattatgaatttttaaagagtaatgtctgactcgttgatcatttatttttgtaaaaataaattaaagtaatgacaaagttattgaagtaaattgagtataaacatttaaatacgatgtcgaaaatggcgatagcatatgacttacatgaagttgtgtgctatcgctatttttagttataattccaaaaagttaatcgttcgatgatttaagaattattattgtttaattcaaatgtatgagggtataaaatcattgaatttaattcgataaagtgaaatttttgagtaaacatacttttgtatttatataaaagtttaaattcttataaatttgacaaaactaattaactccgtataattatgaaacatacaagagggagtgtatgaattcatggattttaataaagagaatattaacatggtggatgcaaagaaagctaaaaaaaccgttgttgcaaccggtatcggtaatgcaatggaatggttcgattttggtgtctatgcatatacaactgcgtacattggagcgaacttcttctctccagtagagaatgcagacattcgacaaatgttgactttcgcagcattagccattgcgtttttattaagaccaattggtggtgtcgtatttggtattattggtgacaaatatggacgtaaagttgtattaacatctacaattattttaatggcattttcaacattaaccattggattattgccaagctatgatcaaattggactttgggcaccaatactattattgcttgcaagagtactgcaaggattttcaacaggtggagagtatgcgggggcaatgacatatgttgccgaatcatctccagataagcgtcgtaactcattaggtagtggactagaaattgggacattatcaggttacatagctgcttcaattatgattgctgtattaacattctttttaacagatgaacaaatggcatcatttggttggagaatcccattcttactcggtttattcctaggattatttggcttatatttacgtcgtaagctggaagaatcaccagttttcgaaaatgatgttgcaacacaaccagaaagagataacattaactttttacaaatcatcagattttattacaaagatatatttgtatgttttgtagctgttgtattcttcaatgttacgaactatatggtaactgcatatttaccaacctatttagaacaagttattaaattagatgcaacgacaacaagtgtattaattacttgtgtcatggcaataatgattccattagcattaatgtttggtaagttagcggataaaataggtgaaaagaaagtatttctaattggtactggtgggctaacattattcagtatcatcgcatttatgttattacattcacaatcatttgttgtaatagtaatcggtatatttatattaggatttttcttatcaacttacgaagcgacaatgccagggtcgttaccaacgatgttttacagtcatataagatatcgaactttatcagtaacatttaatatctctgtttcgatatttggtggtacgacgccattagttgcaacatggttagttacgaaaactggagatccattagcacctgcgtattatttaacagcaatcagtgttattggctttttagttattacattcttacatttaagtacagcaggaaaatctctaaaaggttcgtatccaaatgtagataacgagcaagatagagcttattatgcagaacatccaaaagaagcattatggtgggttaaagaacgtaagaattagagattttaataaaaagtataaatcaatcgtatataagcactttaaagctagtaggttctgctaactttaaagtgctttttaaattgagaactgtaattagccgtaataaagtttttgtatatacataaacccccactgcaatgattatcgcaatgggggaaagaggggacttaaagcatatgtttagctttgaatacttaaaattctcttgctattgaaatgttaggatgtaaatatgtcttagagtattttgtccaacgcaattaatattgagactctaaccttcaatattattatagagaacacaaacttaaatagattgggtgacttatttgtgtcagttattgcgattgcgataacttcttttctctatatacatatagtaacgtcttatctaataaaaaacatggtactacagtatcaaatttatctagggcttaagtttgatttttataataggcaggtttacctgataaaaatacttattcattatataatgttaacaatatgtattttaaagtttacattgagtgagggatattgatgaacgtaattttagaacagttgaaaacacatactcaaaataaacctaatgacatagcattacatatcgatgatgaaacaattacatatagtcaactaaatgcccgcatcactagcgcagttgaatctttgcagaaatattcacttaaccctgtcgttgctattaatatgaaatcaccggtgcaaagtattatttgttatttagctttgcatcgtttacataaagtgcctatgatgatggaaggtaaatggcaaagtactatacatcgtcaattgattgaaaaatatggtattaaagatgtaattggagatacaggtctcatgcagaatatagactcaccgatgtttattgattcaacgcaattacagcactaccccaatttattacatattggttttacttcagggacaactggactgccaaaagcatattatcgtgatgaagattcatggttggcttcttttgaagttaatgaaatgttgatgttaaaaaatgaaaatgcaatagcagcccctggaccactatcgcactcgttaacattatatgcgttattgtttgctttaagttccggtcgtacttttataggacagaccacttttcatcctgaaaagttacttaatcaatgtcataaaatatcatcatacaaagttgctatgtttcttgttccaacgatgattaaatcattattgttagtttacaacaatgaacatacaatccaatcattttttagcagtggagataagctgcattcttctatttttaaaaagataaaaaatcaagcaaatgacataaatttgattgaattttttggtacatcggaaaccagttttatcagctataacttgaatcagcaagcaccagttgaatcagtaggtgtgctatttccaaatgtggaattgaaaacaacgaatcacgatcacaatggtataggaactatttgtataaaaagtaatatgatgtttagtggctatgtaagtgaacaatgtataaataatgatgaatggtttgttactaatgataatggctatgtaaaagagcagtatttatatttaacgggacgtcaacaggatatgttaattattggtggtcaaaatatatatccagcacatgttgaacgccttttaacgcaatcttcgagcattgatgaagcaattatcatcggtattccaaatgagcgttttggtcaaataggcgtattgctttattctggtgatgtgacacttacacataaaaatgtaaaacaatttttaaaaaagaaagtgaaacgctatgaaattccatcgatgattcatcatgtagaaaagatgtattacactgcaagtggtaaaattgctagagaaaaaatgatgtcgatgtatttgagaggtgaattataatatgaatcaagcagtcatagttgcagctaaacgaactgcatttgggaaatatggtggcactttaaaacatttagagccagaacaattgcttaaacctttattccaacattttaaagagaagtatccagaggtaatatctaaaatagatgatgtagttttaggtaatgttgttgggaatggtggcaatattgcaagaaaagcattgcttgaagcggggcttaaagattcaatacctggcgtcacaatcgatcggcaatgtgggtctggacttgaaagtgttcaatatgcatgtcgcatgatccaagccggagctggcaaggtatatattgcaggtggtgttgaaagtacaagtcgagcaccttggaaaatcaaacgaccgcattctgtgtacgaaacagcattacctgagttttatgagcgtgcatcatttgcacctgaaatgagcgacccatcaatgattcaaggtgctgaaaatgtggccaagatgtatgatgtttcaagagaattacaagatgaatttgcttatcgaagtcatcaattgacagcggaaaatgtaaagaatggaaatatttctcaggaaatattacctataaccgttaaaggagaaatattcaacactgatgaaagtctaaaatcacatattccgaaagataactttggccgatttaagcccgtgatcaaaggtgggaccgttaccgctgcgaatagttgtatgaaaaatgatggtgcagttttattgcttattatggaaaaagatatggcatacgaattaggtttcgagcatggtttattatttaaagatggtgttacggtaggtgttgattctaattttcctggcattggtccagtaccagccatttccaacttactaaaaagaaatcaattaacgatagaaaatattgaagtcattgaaattaacgaagcgttcagtgcacaggtagttgcctgccaacaagctttaaatatttcaaatacgcaattaaatatatggggtggtgcattagcatcaggtcatccatacggtgcaagcggtgcccaattagtgactcgattattttatatgtttgacaaagagactatgattgcatctatggggatagggggaggtctaggaaatgcagcattatttactcgattctaaccagcgattaaatgtgtcattttctaaggatagtgtggctgcatattatcagtgttttaaccaaccttatagaaaagaagtaccaccattaatgtgtgcgtcattatggccaaaatttgatttatttaaaaaatatgcaaatagcgaactgattttaacaaaatcagcaattaatcaaactcaaaagatagaagtagacacaatatatgtagggcatttagaagatattgaatgccgacagactcgcaatatcacacgttatacaatggctttaacattaactaaaaatgatcaacatgtcataacggttacacaaacttttattaaggcgatgaagtagagatgaagtttaatgagatatggataaatgaatatttggcgctcgtaaatgatgataatccaatacataatgagattgtgccaggacaattagtgagtcaaatgatgctgatggctatgtcattagagacaaaccagtgtcaaattaactacgttaaacctattttaataaatgaaaatatcgaattcattgaacaacacgaacacgaaattatagcaattaatgacgatggagagattaaaataaaaatttctttgagcacaaaaaaataaccgatattagctgcatgaacgcatattaattaggagatgaaaggacagctaatatcagttatgtattgttattattattgggaacagagatgaatataggttacgtttctttctttgcacggggatgcattaatctaaaataataataacaactatatcaatgtttaataaattctggattattggaacgattagtcaatttaactaactttcatatgatctatatcgtcttgtaataaagagagcaatttgaatatttcagtatcactaaatgaatcgtcacatttaattgaaacatgctgaaacgttttggttataatttcataaactggtgcgccttcatggtgatactgtcgataaataatcataacctatattacctcctttgctactctatggttatattataaataacatttttatgtgtgacatcaaccttaagtatcaactttttatcagacatagaacgtatgatttactaagactatttatgtataaaagttctaaataaatatatatttatagagtcgcctggcagtcatttgggaaatataacatatatgattagagaggcatctatcgcaaaagaatgataatgatagaggtattgagcatatagatgagtttaagttcatcttgaaaataaagggttatttagtcatagatgtagatgtataggaaatatttgtatgtattgttcgatatgtatgaaattttcaataaaagctaataacgcttatatgtaactttcaaatttaaattatatacagagcatgatgattataaaaaaataaccacatcacataaattgagttcatacccaatttaagtggtgtggctaataatgttgatttatagatgaaccgcctaatcgttaaacctctgttacttcaacatcgatatgttcaatacggttgtatgcaccgtgatccacaggaccaacaaaatcattcattttccaaccgtttttaatagcagaagcgacgaaagctttcgcgctaatcacagcttctttcggtgacttaccgttagctaaatatgcagttgttgccgcagcaaatgtacaaccagcaccatggttataactttgttggaacatgtctgttgttagttgataaaatgtttgaccatcatagtataagtcatacgatttatcttgatctaaagctttgccacctttaatgatgacatgctgtgcgcctttatcaaagataattgttgcagcctttttcatatcttcaattgaatttaatttacctaatcctgataattgacccgcttcaaataagtttggtgtcactaccgttgctttaggtagtaaatatttaatcatcgcctcagtatttccaggattaagcacttcatcttcgcctttacaaaccatgacaggatctactacaaaatattgtgcattagatgcctcatatacttctccagcacgtttgattatctcctcagtacctaacatacctgttttaatagcatcaggtccgattgataaagccgtttcaagttgcttttcaaatacgtccataggtaatggtgtgacatcgtgtgaccatgtatctttatccatagtaacgatggcagttaaagcgaccatgccatacgtatctaattcttggaacgttttcaaatctgcttgcatacctgcgccagcacttgtgtcagaaccggcaattgttaaaactttctttaaagccattgagcttcactcctacataataatattgtattcatcatatcatttttaacctaattgaaaaatattaagcattcaatatttgatgattgttgaaatgaatcattcatactattgtaacttttgaaaatgtcattcactttagataagtgtgatatgttaaaatatgtcctgaggtgagattgaatggaatggtcgcaaatttttcatgacataacaacgaaacatgactttaaagctatgcatgattttttagaaaaagaatattcgactgcaatcgtataccctgatagggaaaatatatatcaagcgtttgatttaacaccgtttgaaaatatcaaagttgttatattaggacaagacccgtatcatggtccaaaccaagcacatggattagcattttcagtgcaacctaacgcaaaattccctccatctttacgtaatatgtataaagaattagcagatgatattggatgcgttagacaaacaccgcatttacaagattgggcaagagaaggcgtcttgttattgaatacagttttaaccgtaagacagggtgaagcaaattctcatcgtgatattggttgggaaacatttactgatgaaattattaaagcagtgtctgattataaagaacatgttgtctttattttgtgggggaaacctgcacagcaaaaaataaagcttatcgatacatctaaacattgtattataaaatcagtgcatcctagtccactgtctgcatatagaggattctttggatcaaaaccgtattccaaagcgaatgcctatttagagtcagtaggaaaatcaccaattaattggtgtgaaagtgaggcgtagatgttgaatagagaaactttaatagcacgaattgagcaagaattagtacaagcagagcaggcacagcatgaccatgactttgaaaaacatatgtatgccatacatatattaacatctttatatgcttcaacatcaaatacaccacatattggtgaacaacaaatgaatcgtcgtattgctaaccataatcaaatgccacaatcacaaataacgcagccaactcatcaagtgacagctgctgaaattgaagcgatgggtggtaaagtaaatacgcattcagcacatcatcataataagtcatattcacaaccttcaaaccaacaacaaagattagcgacagatgatgacattggcaatggtgaatccatatttgatttttaaaaagcaacaatgaaacataattacttaatagcttgttaagtatgtaggttaataatcaagacgcatatacttttattcgagtgttcggatttaaacatttattaatactgaattatataaggagaggtagcaatgaaattatttattattttaggtgcattaaacgcgatgatggctgtcggaacaggtgcatttggtgcgcatggtttacaaggaaaaataagtgatcactatttatcagtatgggaaaaagcaacgacgtatcaaatgtaccatggcttagcattattaattataggtgtaattagtggtacaacttcaatcaatgttaactgggctggctggttaatatttgctggtattattttctttagtggatcattatatattttagtattaactcaaattaaagttttaggtgcgattacgccaattggtggcgtattgttcatcattggatggataatgttaatcattgcgacattcaaatttgctggttaaattttaaaactttagattacctatgtaactaaacattaaatttttaataaaaataatcaagaaaaagagttacaaactcatcttttgggtatagaataccttcgaggtgagtttttatttatggaaaaaaagaataagcaaatagatagaggcgatttaaaacaaaacctatctgaaaagtttgtatgggcgattgcatatggttcatgtatcggatggggcgcattcatcttaccaggagactggattaagcagtcaggtccgattgcagcatcaattggtatagttattggtgcattattaatgatattaattgcggttagttatggcgcattagtagagagatttccagtatcagggggcgcgtttgcctttagtttcttaagtttcggcagatatgtgagtttcttctcatcatggtttttaacttttggttatgtctgtgtcgttgctttaaatgcgaccgcattcagtttactagttaaattcttattgccagatgtcttaaataatgggaaactatacaccattgcgggctgggacgtttatattacggaaatcattattgcgaccgtattactacttgtattcatgctagtaacgattcgtggcgcaagtgtatctggatcattacaatattatttctgtgtggcgatggtaatcgtcgtattattgatgttctttggttcattctttggtaataattttgcacttgaaaatttacaaccgttagctgaacctagcaaaggatggttagtgtctattgtggttgttgtatccgtggcaccatgggcatatgttggatttgataatattccacaaacagcagaagagtttaactttgcaccaaacaagacatttaagcttatcgtgtacagtttattagcagcatcattaacttatgttgtcatgattttatacactggttggttatcaacaagtcatcaaagtttaaatgggcagttgtggttaacaggtgctgttacacaaacagcatttggttatattggattaggtgtattagcaattgcaattatgatgggtatatttactggtttaaatggattcttgatgagttcaagtcgcttgttattttctatgggacgttcaggtattatgccaacaatgtttagtaaattacatagtaaatacaaaacaccatatgtcgcaatcatattcctagtaggtgtgtcgttaattgcaccttggctaggaagaactgcattgacttggattgtagatatgtcatctacaggtgtatccattgcctactttattacatgtttgtctgcagcgaaattattcagttataacaaacaaagtaatacgtatgcaccggtttacaaaacgtttgctattatcggctcatttgtatcattcattttcttagcgttgttattagtgccaggttctcctgcagcactgactgcaccgtcttatattgcattacttggatggttaatcatcggtttaatattctttgtgattcgatatcctaaattgaaaaatatggataatgatgaattaagtcgcttgattttaaatagaagtgaaaatgaagttgatgatatgattgaagaacctgaaaaagaaaaaactaaataataaaagaatcgcacaatataccttcttcattcggaggcgtatcgtgcgattttttgtattataaattgacatttaagacgaggcagctgaaccttatatataattgctaagagtttgggctgagccatttctaacaatatttataatcgtttaaaagatttcacgaacccagaaacaattaatttggaaatttggtcggcgaataataaacctaatgcgatggctcctgcaataagtgttacttctaacattgtatttattgctgtgctgaaatttaataagactaaattttttgtagcatcgtatgctaatccacctggtactaatggaatgatacccgttaccataaaaatgatggcaggttctttttgtttacgagccatataatgacttaacaagcctaatgctaaactaccaaagaaactagagtatatagtgtgcacattaaagccgttgaagaataaggtgtaaaccatccatccacatgtaccaacgaaaccacatgatagatataattttctaggtgcatcaaaaatgacgcagaagaacattgaagctaaaaagctaaagataaagtttaagatccaaaacatagtctgatactcctatactaaaattaatacgctaccaacgccagcaccgatgccaaacgcagtaaccaatgcttctaatgatttcgttgtgaacatcaacatgtgtccaccaaataaatcttgtattgcgtttgttattaatacaccaggaacaataggcatgactgccgcaatgataatagttgccaagtcacctgttggaataagtgtatgtccaataacggcgataatcccaataactaatgaaccaatgaattctgggataaactgtgcgtgtaacttacgatctaaaatctcagtgactaggtatcctagactacctgctaatatcgcagttaaaacatcaatcaatctaccaccttgtaaatataagaaactcattgcaatcattgctgcagcaaaacctttaaagggaagactgctgtcacgcttagcaacatatattttttcaagttgcgtttttgcttcggctaaagaaatttcattatttgtaatttgacgcgaaattttattagcttgcgaaatttttattaagtttgtatctcgagaggtaattctaaatattctaggaaacgattccgaatgtaacgtaaactggatgacagtgtttgtaacaaagctgttactttcactgtaaccaagtttttttgcaatacgtgtcatggtatcttctacacgcgtaccttctgcaccagattctaatagtatgcgagcagcaagcatgacaacgtctttgataagtacctcttgtttgtattcttctgaatttatgtccatttcatcaccattgtttataagaatttaatactcattatagtttatacactataaaataaccacatgagctttttgataagttgttattgattttaaaaaactaatatttgatactattgtaataataatcatcggaatttttagtagttaaaattctcttgaagtataaaaaggaaaaattattgaaaaaaattcgacaaaaatatgtttcaaatatttcaaataggttaaaataatattagttaaccattacaaaaattgtatagagtagcgactgtataatttctattgaggttaacgtttatatgtagtgatagtagttaaagttctcccaaggaagactactcgggtacactttgctatgagcaaagtgtactttgttattgataatacattagcacatatatataagtttaaacatacagatttcaactatttaccaaatcacgtcttatgtatacgggaatatactgaagataaacgaaaaattccaagcttaaaccgataagcttggaatttttttattaatttataaacgtaccaatgtattaagaaatcgcaaagaattgatcgaattcgtttgtgttaataatatgtcctacaaagaaactaccgaattcaccgtatcgtgctgttgtttcatcaaagcgcatttcgtatacaatttttttgaattgtaatacgtcatctgagaacaatgttacgccccattcgaaatcatcaaaccctacagaaccagtaataaattgtttgattttgccagcatattttctaccaatcataccatggtcatacattaatttttggcgttcttccatagttaacatgtaccagttataagtttcattacgacgtttgttcattggatagaaacaaatataatcagaatgtggtaattctgggtataatcttgctttgatatgagggttctcataaggatcttcatcagatttaccagctaaataattgctcaattcaatgactgatacatatgaatatgtagggattaagaagtcagcaatgcgcaatttgttaaattcattttcaatatgatttaaagacttcatttcaggacgtaagtaccataataacaaatctgctttttgaccagttatattataaatagcttgatcaccagattttgatgatcttacagttgctgtattttctaaaaatgattgaaattcagtgacaagtgcatcgcgttcgtcctttggaactatacgtaatgatgcccaatcaactgcataaaataaatgtagactataccaaccatctaatgtttcggctgcttgactcatgtttatcgctccttttcaaaaatcatcagttctttataaattttatcataaagcaaaggggtaacgataaaattatgattacaaattggtgacgtggcattatgaaataaaatggcgtataattataccgtgaatgattaataagatttatattacaggaggacattatggctgatttattaaatgtattaaaagacaaactttctggtaaaaacgttaaaatcgtattacctgaaggagaggacgaacgtgttctaacagctgcaacacaattacaagcaacagattatgttacaccaatcgtgttaggtgatgagactaaggttcaatctttagcgcaaaaacttaatcttgatatttctaatattgaattaattaatcctgcgacaagtgaattgaaagctgaattagtccaatcatttgttgaacgacgtaaaggtaaagcgactgaagaacaagcgcaagaattattaaacaatgtgaactacttcggtacaatgcttgtttatgctggtaaagcagatggtttagttagtggtgcagcacattcaacaggcgacactgtgcgtccagctttacaaatcatcaaaacgaaaccaggtgtatcaagaacatcaggtatcttctttatgattaaaggtgatgaacaatacatctttggtgattgtgcaatcaatccagaacttgattcacaaggacttgcagaaattgcagtagaaagtgcaaaatcagcattaagctttggcatggatccaaaagttgcgatgttaagcttttcaacaaaagggtctgctaaatcagacgacgtgacaaaagttcaagaagctgtcaaattagcacaacaaaaagctgaagaagaaaaattagaagcaatcattgatggcgaattccaatttgatgctgcgattgtaccaggtgttgctgagaaaaaagcgccaggtgctaaattacaaggtgatgcaaatgtctttgtattcccaagtttagaagctggtaatattggttacaaaattgcacaacgtttaggtggatatgatgcagttggtccagtattacaaggtttaaattctccagtaaatgacttatcacgtggctgctcaattgaagatgtatacaatctttcaattattacagcagcgcaagccttacaataacgatggatttagcgagtaaatattttaatggcgtcaactggcgatatatcgatcattcttctggattagaacctatgcaatctttcgcattcgatgatacattttgcgaaagtgtgggcaaagatatatcagataatgttgtgcgtacttggattcatcaacatactgttattcttggtattcatgattcaagattgccgtttttaaaagatggcattgattatttaacgaatgagattggttataatgccattgttagaaattctggtggcttaggtgtcgttctagatcaaggtgtattaaatatatcgctgatgttcaaaggacaaacagaaacaacgattgatgaagcgtttactgtgatgtacctcttaattagcaaaatgttcgaagatgagaatgttgatattgatacgatggaaattgaacattcttattgcccaggaaaatttgacttaagtatcgatggtaagaaatttgcaggcatatcgcaacgaagagttagaggcggtattgctgtacaaatttatctttgtgttgaaggctctggttcagaacgtgcattgatgatgcaaacattttatgaacatgctttaaaaggtgaagtgactaaatttaaatatcctgaaattgaaccatcttgtatggcctcattagagacattgcttaacaaaacgattactgttcaagatgtaatgtttttactattatatgcaatcaaagatcttggcggtgtattaaatatgacgccaattactcaagaagaatggcaaagatacgatacgtattttgataaaatgattgaaagaaacaagaaaatgatagatcaaatgcaatagttaaatatttaacagcccctttcaagttagcgtttggggctgttatttttgaaagtatccataaaaagcataaatatgttattgacctaatatttaaattgaacatcattaaattaaaagtaatgatatgatggaaataataaatttaataagaaaatttcatgttttacgtattaaatagattgagaatagggtatatataatgcgtatgactatgaaagaaacgaccttctattgaaatgttctaatactttagtagtaaatctatatattccaattattatttgtagtattatagttagggtggaaaattataaattgtagggctattttataaaaagataaagaatctgaaatatcactcgataagatttaaactttgaagtaaacgaaagttagttttatactaatcaagttaagtcaaatataaattcaaaataaagattatacataatatgaataatgtgagataaagactgcaatgaaatttaacgcgaatgcgtatgcaacttagaatatgatgtcttttactaataaataaaaataatgaatcaagtataggataaatataaaaggtgatattgacatgacaagaaaaggatatggggaatcgacaggtaagattattttaataggagaacatgctgttacatttggagagcctgctattgcagtaccgtttaacgcaggtaaaatcaaagttttaatagaagccttagagagcgggaactattcgtctattaaaagcgatgtttacgatggtatgttatatgatgcgcctgaccatcttaagtctttggtgaaccgttttgtagaattaaataatattacagagccgctagcagtaacgatccaaacgaatttaccaccatcacgtggattaggatcgagtgcagctgtcgcggttgcttttgttcgtgcaagttatgattttttagggaaatcattaacgaaagaagaactcattgaaaaggcaaattgggcagagcaaattgcacatggtaaaccaagtggtattgatacgcaaacgattgtatcaggcaaaccagtttggttccaaaaaggtcatgctgaaacattgaaaacgttaagtttagacggctatatggttgttatagatactggtgtgaaaggttcaacaagacaagcggtagaagatgttcataaactttgtgaggattctcagtacatgtcacatgtaaaacatatcggtaagttagttttacgtgcgagtgatgtgattgaacatcataactttgaagccttagcggatatttttaatgaatgtcatgcggatttaaaggcgttgacagttagtcatgataaaatagaacaattaatgaaaattggtaaagaaaatggtgcgattgctggaaaacttactggtgctggtcgtggcggaagtatgttattgcttgccaaagatttaccaacagcgaaaaatattgtaaaagctgtagaaaaagctggtgcagcacatacttggattgagaatttaggaggttaatgcgttgattaaaagtggcaaagcacgtgcacatacgaatattgcacttataaaatattggggtaaaaaagatgaagcactaatcattccaatgaataatagcatatctgttacattagaaaaattttacactgaaacgaaagtcacttttaacgaccagttaacacaggatcaattttggttgaatggtgaaaaggttagtggcaaagaattagagaaaatttcaaaatatatggatattgtcagaaatagagctggcatcgattggtatgcagaaattgaaagcgacaattttgtaccaacagcagcagggttggcttcatcagcaagcgcatatgcagctttagcagcagcttgtaatcaagcactagacttgcagctgtcagataaggatttatcgagattggcgcgaattggttcgggttctgcatcgcgtagtatttatggtggatttgcagaatgggaaaaagggtataatgatgagacgtcatatgccgttccacttgaatcgaatcattttgaagatgaccttgccatgatatttgttgtgattaatcaacattctaaaaaggtacctagtcgatatggtatgtcgttgacacgaaacacatcaaggttttatcaatattggttagatcatattgatgaagatttaactgaagcaaaagcagcgattcaagacaaagattttaaacgccttggtgaagtaattgaagaaaatggtttgcgtatgcatgccacgaatctaggatcaacaccgccgttcacatatcttgtgcaagaaagttatgatgtcatggcgctcgttcacgaatgccgagaagcgggatatccgtgttattttacgatggatgcgggtcctaatgtgaaaatacttgtagaaaagaaaaacaagcaacagattatagataaattattaacacagtttgataataaccaaattattgatagtgacattattgccacaggaattgaaataattgagtaaggaagagataaaatgattcaggtcaaagcacccggaaaactttatattgctggagaatatgctgtaacagaaccaggatataaatctgtacttattgcgttagatcgttttgtaactgctactattgaagaagcagaccaatataaaggtaccattcattcaaaagcattacatcataacccagttacatttagtagagatgaagatagtattgtcatttcagatccacatgcagcaaaacaattaaattatgtggtcacagctattgaaatatttgaacaatacgcgaaaagttgcgatatagcgatgaagcattttcatctgactattgatagtaatttagatgattcaaatggtcataaatatggattaggttcaagtgcagcagtacttgtgtcagttataaaagtattaaatgaattttatgatatgaagttatctaatttatacatttataaactagcagtgattgcaaatatgaagttacaaagtttaagttcatgcggagatattgctgtgagtgtatatagtggatggctagcgtatagtacttttgatcatgaatgggttaagcatcaaattgaagatactacggttgaagaagttttaatcaaaaactggcctggattgcacatcgaaccattacaagcacctgaaaatatggaagtacttatcggttggactggctcaccggcgtcatcaccacactttgttagcgaagtgaaacgtttgaaatcagatccttcattttacggtgacttcttagaagattcacatcgttgtgttgaaaaacttattcatgcttttaaaacaaataatattaaaggtgtgcaaaagatggtgcgtcagaatcgtacaattattcaacgtatggataaagaagctacagttgatatagaaactgaaaagctaaaatatttgtgtgatattgctgaaaagtatcacggcgcatctaaaacatcaggcgctggtggtggagactgtggtattacaattatcaataaagatgtagataaagaaaaaatttatgatgaatggacaaaacatggtattaaaccattaaaatttaatatttatcatgggcaataaatgatttgataggggagcaatcatctaatttaattagaagataaatgctccattttttattgtcagccgtgttacgtatcttgaaaaaaatattaaaaagagtaaaatagatagagttaacgaaaaaattaatgaaatcgacgatatagatatgataaagaaaggtgggtagcaatatgaaaaatacattccttatttgtgatgaatgtcaggcagtcaatataagaacgttacaaaagaagttggaaaaattagatcccgatgctgaaatcgtgataggttgtcaatcttattgtggacctggacgccgaaaaacattcacttttgttaataaccgcccactggctgcgcttactgaagaagaattaatcgaaaaagtttctcaacaattaaagaaaccacgtgatcctgaagaagaagagcgtttaagaaaacgacatgaagaacgtaaacgtcgtaaagaagaacaagatagaaagcttaaagaaaaattagaaaagcgaaaagcacaacaataaagcctgatggcagcatcattcaatgcgtgccaccaggtttttatgttttgtctagaaattaaataaatcattaaatgattcggccatcgtaggatgcgtataaatattatctcgtaatacggtatatggaatgttttgatcaatcgcaagtttaattatattaattaattcttcagattgcttaccatataatgtagcacctaaaatcatattattttcattattaatgactactttaaataaacctcttggatcattgttaattttatgacgaggtatagcacttactaaaagttgatgttcagtgtaatcataatgttgagcggcagcttctttactagttaatccaacacgtgataatggtggatctataaatactgtataaggcacgctgcctctattgtcagtcgtacgtgactgattaccatataacgctgatttgataattcgataatcatctaaagatatatacgtaaattgaagtccgcctttaacatcacctgcagcataaatatgcggcacagttgtttgaagatgagcattgactttaatttcgcctctgtcgcctaattcgatatcagtattttctaaagctaaatccgtattcggtttgcgcccgatagccaaaagtactgcatcagcctcaaagttaccaacgttggtatggactgttgtatgatgattgtcagatgacaattcagtcgtttcaacatttgtatgcaatgcaatgcctttattttctaagtcagtaataccatgtgcaacgacatcttgatcttcgcgtggcataaatgattcgccacgttctaatactgttaccttactacctaaattcgcaaacattgaagcaaattctaaggcgatataaccgccacctacaataacgaggtgcttaggttgatagctaatgtttaataaacctgtcgaatcgaagacgtgtttagcttgatcaaggcctttaatgttaggaatgacagaggtagcaccggtattaataatgatatgaggtgcagtaatactatcgacgatatcgtcatgttgatctaataaattcacttcagtattagatttaaactgcgctttaaaatccagtacatcaatgttgttatcgtctgctaataagtggtaatttttattgtttagcccattgacaacatcgtttttacggttataacttgcttcaaaagatttgccttctaatccatcatgtacaagtgtcttcgaaggtatacatcctatattgataaactgttcgtagttccgcacaaaagaagttaataaaaatcaatattctttattttgatagaatgcttagttttccctcttttaacgtgaatgtactctatttcaatagattttatggccatcttaatgaagtctgctttatcttctaaagtaaaggcattccatgagtctaaaagaatatttttgaatttttttatcttactgacatctaatcgtttttcaggaactctctctttttgtttttcgtattctgaaatcttttcgtcagtttcttttattaattcaaataattcttcttcttgcatcatgccgtttgcgtataatttgtgatatctttttctttgttccataactttatttatatcaatggttacaatttttttatcttctttttcttttgttttgtatttacttaaatctaacttagaaaggtaatcgtaaaatacttttaaagcttctttttcggtaaatgaaaaagcaccatttttattaactttgcaattattacaataataatttttgtgtataacatctccacgtttaagttttctataactggtattcaaacataatcttccattgcaattagggcagatgagtttacctctaaaaactgaagtatgagttattgttttcgcattaacacgttcattcaagcgttcctttatttcgttatacatttcatctgtaattattggttcgtgagagttttcaataaatatatccccccaaaaatagtgcccttttgataaagggctccttaaagctcttgttattgtcctatcttcccactgtatgccgtttggtggtggtatatcagatgcgtttaacttccttgctatacctttagcgctatttccttttttaacctcttcataagcccacacaactacatctttatatttattaggaatatatttattatctacacgatcatagtagaatgggggaggtgttaatatcatgccttttctaatcgctgcttgcttgcccatcattgccctttcccttatcgtttcacgttcccactcagccatagcacctactaaagtgacgaataggcgacccattgccgtcgatgtatcataaacttctgtggcacttctgaaagatacgttttctcgctcaaatatttctaataaatcaagtaaatcttttacattacgcgtcaacctgtctaacttatagactaatactaaatctatttttgataaattttcctttaatctattaagttcaggtcggtcagttttagcaccagaatagccagcatctacataaacaccttgtatagtccagtcgtttatgtcgctgtatgctcttaattttctttcttgttcttcaatagagtgtcctttttctttttgttcaagtgtacttactctagtataaattgctactttcatgtgctccctcctcaaaattggcaaaaaataataagggtaggcgggctacccgtgaaaattgtataaaaaaagagagaacgcagatgcaccctctcatgtcgcaaatatttcagcgacttgtctaatttgaagcttgccgcaaatatttcagcggcttgttttgtatatatgtaatataccatcaaagagagtgtagttcaagcgatttaactaagaaatctaatttttatactattttcaattttatctactgtttcttttgaatatgatatttctccggcagggtcatacctattaattttcgatattctatccttgctgattgtagtgatatttaaaacgttagcataggtctttttatacttgaatcgctcatatcttttgcgaaccttcgaatattttttgaagtcgtcattcagcgatttgttttcatcaagtaatttttgatcgtatgggttttctgcttttgacaccttttcaagattgttcatgatttttttagctaaatccttacccgttacgtccattttttccaatactaaaggtaacaaatcttcttcgatatgcacattgaatttacttctggaagatgtaagtggaactaccgttaatattggatttttatttgaatcgtgattattaagtaccatacaaaaatggtttccagaaaactctctgccaacattaacacctaactttacataaattatagtgccttttttatatctggtgtaacttttgttttcttttaacaatctaacttcatccaataaaaactctgaatattcaagacaccatgaattcatatatttaaatttgtaaatctcgctattttgaatctttttaaaattattaactgctgtttctaaaggtgcgttctcttccatccctcatcctcctcgcgccacataggcgttattaatcacaatacaactttgcccattactttaatattactaaacgaagcgactttgatatcatcatacttcggatttagagataccaaattaatatagtcttcgcatatatctacacgcttgataagacttactccatctaatacaacgagtgcaattgtaccatctttaatagaatcttctttcttaataaaagcgtatgttccttgttttaacataggttccattgaatcaccattaactaaaatacaaaaatcagcatttgatggcgtttcgtcttctttaaaaaatacttcttcatgcaatatgtcatcatataattcttctcctatgccagcaccagttgcaccacatgcaatatacgatactagtttagactctttatattcatctatagaagtgactttattctgttcatctaattgctcatttgcgtagttaagtacgtttttttgtcttggaggcgtgagtttactgtatatggaagtgatgtcgttttttttattatttcttgtaggaaacaaatcatcgatactgatatttaaaatatgagcaatttcaaacaaatcatcttgtttaggagttctgtaccctgtctcataatttgaaatagtagcctttttagtgttgagtttttctccaagttgatcttgagttaagttcaatttggttctatagtatctgattttattgcctataaatttcgctaattcttttttatccattttcttacctccttaaatttacctatagtataacccaattatttttggtattcaacaaaaaaatacacgaaaagcaaacttttatgttgactcaagtacacgtatcgtgtatagttagttttgtaagcgggaggtgacaacatgcaatggaatttaataaagttgagaaaagaaagaaagtgtactcaagaagatttagcaaacctcttgaatatatcaactgaaggttatcgtttaaaggaattaggaaagcatcaatttaagaatgatgagatgtttattatcgctgatttttttgacgaaaatattggagatatttttttacccacaaagtacacgaaacgcaaacaaacattttaaaaggaggaacgaacaatgcaagcattacaaacatttaattttaaagagctaccagtaagaacagtggaaattgaaaacgaaccttattttgtaggaaaagatattgctgaaattttaggatatgcaagggcagacaatgccatcagaaatcatgttgatagcgaggacaagctgacgcaccaatttagtgcatcaggtcaaaacagaaatatgatcattatcaatgaatcaggattatacagtttaatctttgacgcttctaaacaaagtaaaaacgaaaaaatcagagaaaccgctcgaaaattcaaacgatgggtaacatcagacgtcctaccagccattcgcaaacacggtatctacgcaacagacaatgtaattgaacaaacattaaaagatccagactacatcattacagtgttgactgagtataagaaagaaaaagagcaaaacttacttttacaacaagaaattggagagctaaaacccaaagcagactatgtagatgaaatcttaaagtcaactggaacattagctacaactcaaatcgcggcagactacggtatatcagcacaaaagttaaacaaactactacacgaagctagattacaacgaaaagtgaataaacagtgggtgctttactcagaacacatgggcaagagttacacagaatcagacactataccaattgtacgctctgacggtagagaagacacagttttacaaactagatggacacaaaaaggtagattgaaaatacatgaaatcatgactgaattcggttatgaagctaacgtaactgcttaacaggagggcgcagcaaatggaagatcaaaacaaaaaagtcatttattactactatgacgaagcaggtaatagacaactattatcaattggagatttgaatctctatttattaaaagatattaaatcaagatttggtttatataaaaaacaaatccctgatttagataatctgttcgttcaaatagacggtgttgaatttaaagtactataacccgagcaatgcacctcttaaacaacattatacacgaaaggagcataaacaaatgaacacactatacaaaacaaccctcctcatcacaatggcagttgtgacgtggaaggtttggaaaattgaacgaaatacgagaaagcctgtaatcaatcgaaatgattttagtaaagagtctacagcagaaacgattgagcgacacagtgatcctgattcaggaataaaactacttaaggcgttttccgactttactaaagagaacctttcctaattctaagaagatgaagtttcgttggtactcaagtgactcatgtaaagcagtagagtaaatcttttcactggaaacaccttcatcagcattctctgtaagtttttgaaggttcttcttgaagtgttcactttgaccaccgtatagttcatcagcttcattaacaattttatagtaaagctgttcatattcactatatgacatattatccacctcctttcaataggagataactaaattatacacgaaaggaatgatagaaatgccaccacacattcaacaaatgctattcgactttgcattagagagaggatatatagacatgattataaaaatgaaagaagaggagaatgccaaatgagtaacatttataaaagctacctagtagcagtactatgctttacagtcttagcaattgtacttatgccgtttctatacttcactactgcatggtcgattgcgggattcgcaagtattgcaactttcatattctataaagaatacttttatgaagaataaaaaaactgctacttgcgccaacaagtaacagtgacaaacgattaacaaaattaattcatgttcaatataaaacgaaataaaggaagtgtcaacaatgtactacaaaattggcgatgtatgtcaaaaagtaattaatgtagacggattcgattttaaattagcagttaagaaacaagattacagcattctagtgaatgtcttagatttagaagatagatttatcgacagtataaatataacagatgagaatgatctatacacagcattagacatattaaatcaatctatttatgaatggattgaagagaacacagacgaaagagacaggctaattaacttagtcatgagatggtaggtataagcatgagagatacagaaagaaatatattgaatatttttaaaacgttattcgacgaatatactttgtcaaaccaacgagcattattggaaattgaacgtaatcatcacggatacttatcgattaatttcttgcactatcacgacagttacaaaacgaacaataagcttgtacagatacatgaaatcaatccagacagccatgaacgaataaaaaatttaattatcgaggtgctaagaggtcatcggaagattaaaaaaggagcatgaggaaagatatgaaaataaataagttagctatatcgaactttgctggaatcaaagaagaaaaatttaactttgacggtaaagatgcaaaaatatacggcaataatgcgactggcaagactacaacagcaaccgcattacaatggctgcttttcgataaaggtttggacggatcaaccaaatcatttaaccctgtatctttaaacgaaaaaaacgaagaaaattatgagttaattccgactgttttcgcagaatttgaaatcgacggaaaaattacgacttttaaaaaagagtcacatcctaaatacacaataaatcaaaaaacgaatcgcaaggaatactcacgaagtcgaacgaagaaacaatatatcaatgatgaatcaataaaagtaaaggattataaagctcgtattgatgaactgattgatgaagatgtattcaagttaattacgaaccctcaagcatttaacttactagattggaagaagcgaagaagtttgttgtttgaaattgctaaaccaatcaatgatgaggatgtcattaaaacaaatgatgattttaaagaattaaataatattcttggtgatcatgaaattgaaacaaagaaaaagattcttacggacaagataaaacagattaacaaatacatcaaagatattccgatacgtattaatcaaacacaacaaaataagcaggatgtaccagaattcgataatgatagatacgcaattatcaaacaagaaattgagcaacttgaaaatgagcgtatagatattcaaaacggtaaggaagaaattaatttgcgtaatcaattagctgataaacaatcagaattgaaacgcatagaagacaataacagcgcaagtaatgagaacaaaatccatgctttaacaaatgaattacacgttgaaaatggaacggtagcaaaccttaaaacgagattaaagcaaaacaaacaacaaatcacgcatgaagaaaatagacgtaatcaattattagaaaatcataaaggattaaaaagtgatttagaaaaagctaaaaatcaaaaatttgaatatcttgatgacaatgtatgtagttgttgtggtcaacagttaccagctgaacaagtgaatgaggcaagagaaaaagcattgcagaaattcaatgctggcaaatcgaaagaattagaaacaatacaaacatctatcaatcacattatttcagaaggcaagaaaataaagccaatcatcgagaagttagaggatgacaataataatcttcaaattaaaatcaacgaagcagaagagcgttcagcaagaatacaaaacaaaattaataagttgaaaacgactcatgttgacgttacacaaactgacgaatacaaagcagtaatgttagagataaacgagattaatcaaaaacgctcgaacattaggaaaactattcaagataacgtttcaggaatagatgacaaaataagcgaacttactcaagaaaaatcagaaattgaagtgtcaagatcaatcgaaaaatcaaataaacatctagatgatgttatttctgaattaagaaatgaagaagatagattattggatgaaaaagaaaagtattcacatgacctttatatcttaaaagaatttacaacaacaaaagtcaaaatgcttactgaaaatatcaataatgaatttgagattgctgaatttaagttattcaataccttagttaacggcgaattagaagaaacatgttccacaacggttaacggcgtcgaatacgacagcggtttaaataacgcctcaagaattaatgttggcttagatatcatcaatacactgtcaaaacattttaaagttacagcgccaatatttattgataatgctgaatcagtaacagagcttatcaaaacagaatcacaacaaattcaattgatagtaaatgaacaagataaaaaaataagaatggagactatataaaatgactgaaaataataaattacaaactattgaacaacaattagtacaagaaaagaacgtatctgacaacgtattaaacaaagtgagagttttagagtcacaaggcaatttggaattgccaaatgattattcaccaagtaatgccatgaaacaagcatggttacaaatcagccaagataacaaattaatgagttgtaacgatacaagcaaagcaaatgccttattagacatggtaacgcaaggtttaaatccagctaaaaatcaatgctactttattccttacggcaacaaaatgcagttacaacgtagctatcacggtaatgtaatgatgttaaaacgtgatgcaggtgctcaagatgttgttgctcaagtgatttataaaggcgatacattcaagcaagaaatgggagaaacaggacgtatcaaagcgattaaacacgaacaagacttctttaacatcgacaaagaaaacattatcggtgcgtactgcacaatcgtatttaatgatggacgagataactatattgaagtcatgactattgaacaaattaaacaagcatggatgcagtcatcaatgattaaagatgaaaaagcattacaaaattctaaaacacataataatttcaaagaagaaatggctaaaaaaacagttatcaatagagctgctaaacgttatatcaacacatcaacagatagcaatcttttcaaatacgcacaagaatccgaacaacgtcaacgcaaagaagtgttggacgcagaagttgaagaaaatgcaaatcaagaacaattggactttgaacaaccagttcttgaagaagcacaatacacagaattagaaaatgataagcctattgatgtatctgactttgaagaaataaaagaacctgcaacagaaaaagaaagcgaagaagagccattttaattgaaacaatagcaactggttcaagtggtaactgctacgtcttaaatgatggacgtactacgttactacttgaggcaggtataaaatttgaacgtgttcaaaagcattttaaatataaaacaagacatatagcagggtgtcttatcacacacgaacatggtgatcatgcaaagtacacaaagcagtttgtcgacaatggtgtaatcagctatatgactgctggaacacaacaagctatgaattttgaaagtcatcgcttatgcacgattaaggcaaagcaagagctgcgaataggcacatggtcaattctaccgtttgacatcgaacatgatgctaacgagcctgtggctttcttattacaaagtacactaggttataaggttctgtatgttactgatacaaagtatttgaaatacaaatttaacggcattacacacatgatgttagaagttaattatatctatgaacaaatgcaagaaaacataaaaaacggcagtgtgcacagcacattagcaaatagaattatggagtctcattttagcttagaacatgctatcggaatgttaaaagcaaatgatttaactagactcgaagaaatacatttaattcatttaagtagtcaaaattcaaatgcaaaatacattaaaagtgaaatacaaaaagtgacgggcgtgcccgtttatgttggaggtttataaatgctaaatagagttgtattagtaggtcgtttaacgaaagatccggaatacagaaccactccttcaggtgtgagtgtagcgacattcactcttgcagtaaatcgtacgttcacgaatgctcaaggggagcgcgaagcagattttattaactgtgttgtttttagaagacaagcagataatgtaaataactatttatctaaaggtagtttagctggtgtagatggtcgcttacaatcccgtaattatgaaaatcaagaaggtcgtcgtgtgtttgttactgaagttgtgtgtgatagcgttcaatttttagaaccaaagaacacaaatgactctcaacaagatttatatcaacaacaagtacaacaaacacgtggacaatcgcaatattcaaataacaaaccagtaaaagataatccgttcgcaaatgcgaatgatcctattgaaatagatgacgatgatttaccattctaatttaaccggtttgaaagtgaggtgtgtatatgactggttggataaaacttcatagaaaactattagattcgcctatttttcagaacgaaaagttattcaaagtatttgcatattgtcttatgaaggctagtcataaggatcatacacagcttgttggcagacgagttgttgaattagaaaaaggtcaatttgtgttcgggagaaagcgagcaagcgaagagttgcgtctcaaagaatccacagtaagagactacataaaacttttagaaaaccttggaactatcgtcgtaaagtccgacaacaaattttctgttataaccgttgtcaattgggcgatttatcaaagtatggaagaaaattccgacagcaaaaacgacaacaaatcaacaacaaatcaacaacaaatggacaacaaatcaacaacaaatcaacaacaaatcaacacaaacaagaatgtaaagaatggggataatgtaaagaatggtgagaatgagaagaagaaggtaaccgccttcgacttcttccaagataacggattcggtttcataactccttacaatttagacgatttaaattactatcttgattcatttgaaaatgattcagatgaaatagttaccgcatcacttaaaatcgctaaagacagaaacaaggttacttggggatatgctaaaagcattttgaatacatggcttaatgcaaacttgaaatctattgaacaagtacgtgcatttgaaaagcaacaacttgaaagcaaaaaacaaaattataaaccttacgttaaacaaccaaaagaaaaaacacctaaatggctcacagacagcacgagagaaacgaaaacgccggaagtagatgaaaaccttgagaaagacagagaagcttttattaagcgtctaaatagcaaatgggagtgattgaaaatggatgcatttgataaatactatctatttgatcatgacggcaacaaaatgttttcagttacaccacattttaaagatggtcggcatttagttgttggaataaaagaaacaaaatttaatggtcgtcgttggtatttagacgattatgaattaaatacacttattgataatgaacaaatggagttaggacaccaaacaagcttatttgaatatatatgagggattacatggagatagaaattaaatttaatgaagtgtttaatgcgccgatggggtcgcctcgtccacgctttcgtaatacaggtagatatgcacacacatatatgcctacaaaatatacagaacataaaaaatatttacaaaatcaaatgccaaagctaaatctagaaaatgcattaaaaatcgaattagacttttactttccattgcttaaatcatggtcgaagaaaaagaaaagcgaaatggttgggcagtataaagtgactaagccggatatcgacaatttgatgaagacagttctagacgcttgtaacaattatttgtggaaagatgacaatcaaattgcagaaataactagctcaaagcgttatggaattgagcccaaaataatcatacgaatagaagaaatataagaggtggaataaatggcgaaaacagcaagaattgtaaggatacacgataaaccttataggttcagtaaatttgaaatggaattaatagaaagtcacggtataaccgctggaatggtttctaaaagagtaaaagatggttgggaactacatgaagcaatggacgcaccagaaggcatgcgtttaagcgagtacagagaaaagaaaacaatagaaagactggaacaagctagactcgaacgtaaattggaaagacagcgaaagaaagaggcagagctaagaagaaagaagccacatttatttaatgtgcctcaaaaacattcacgtgatccgtactggtttgatactacttataaccaaatgtttaagaaatggcaggaagcataaatgcctaaaaccgatagcgcatgtaaagaatacttaaaccaatttttcggatctaagagatatctgtatcaggataacgaacgagtggcacatatccatgtagtaaatggcgcttattactttcacgggcatattgttccaggttggcaaggcgtgaaaaagacatttgatacagcggaagagctcgaaatatatataaagcaacatggtttggaatatgaggaacagaagcaactaactttattttaaggagatgtaaaaatgaaaatcaaagttaaaaaagaaatgagactggatgaattaattaagtgggcgcgagaaaatccggagctatcaaaaggaaaaatttttcttgcaaaagtttttagtaatggattcgttcgttttcaacgaaatacaaatacgtgttcgatatcaagttttattccaattgatactcctttcatagttgaagttgaagaggaaatcacagaagatacagtatttgataggttgtttgaagtgtacgagcttcaagagggagcctatatgtcagcgttacacacaagtattagtatcaacgaacgtttagagaacacgtttttccctaccaaagcattctacatcttgaacgacggcctaactatgacattaatttggaaagatgggagattggtagaatgaactatgaaacagggttccaactaagcgtaatggacgctaggttgaagaagatgagaaaacaacgtgatgagtacaagaagcaacgtgacgagcttattggggatatagctaagttaagagagcgtaacgaagagctggagaacatgtggcgcacagtcaaaaatgaattgcttggaagatacgaacattgctgttttaaaattagagaactacaccctgagagcaaagcgaacaggataggagctctctatataggaggtaaaagcactgcagatattatactgtcgcgaatggaagaactagacggaacaaatgagttctacgaatttttagggcaaatggaggatgacactaatgaataatcgcgaacaaattgaataatcagtaatcagtgctagtgcgtataacggcaatgacacagagggattgctaaaagagattgaggacgtgtataagaaagcgcaagcgtttgacagactacttgaagacattaataactttactcaaagtccgactaaaggagcgctagaactagatgaagcaatagggattatggtaagtcaagttatctatgaatacaaggaggaactggagaatgaaaaaatttaatgttcaaatcacatatacaggcatgattgaagaggctatcgaggctgaaagtttagaagaagcagaatttgaggctcatgatattgcgagaatggaagtgccatttgattgtgatgaatttgaaattaatgtagaggtggaacaggaaaatgaataacacattaacaattgatcaattacaagagttattacaaatacaaaaggagttcgacgatagaataccaaccagaaatttaaatgacacagtagctagtatgattattgaatttgcggagtgggttaacacacttgagttttttaaaaattggaagaaacaaccaggtaagccattagatacacaattagatgagattgctgattacttagctttcagtttgcaattaactttgactattgttgatgaagaagatttggaagaaactactgaggttatggttgatttgattgaaaatgaagttactttacctaaactacattcagtttattttgttcatgtaatgcatacactaacagaacaatttgtaaaaggtattgataatagtattgtacaagttttaataatgccttttttgtacgccaatacttactatacaatcgaccaactcattgacgcatacaaaaagaaaatgaaaaggaatcatgaaagacaagatggaacagcagacgcaggaaaaggatacgtgtaaagacatattagatcgggtcaaggaggttttggggaagtgacacaatacttagtcacaacattcaaagattcaacaggacaaccacatgaacattttactgctgttagagataatcagacgtttacagttgttgaggcggagagtaaagaagaagcgaaagagaagtacgaggcacaagttaaaagggatgcaattattaaattaggtcagttgtttgaaaatataagggagtgtgggaaatgacggatgttaaaattaaaactatttcaggtggagtttattttgtaaaaacagctgaaccttttgaaaaatatgttgaaagaatgacgagttttaatggttatatttacgcaagtactataatcaagcaaccaacgtatattaaaacagatacgattgaatcaatcacacttattgaggagcgtgggaaatgaatcagctgagaattttattacatgacggtagtagtttgatattacatgaagatgaattatttaacgaaatagtatttgttttggacaattttagaaatgatgatgactatttaacgatagaaaaagattatggcagagaacttgtattgaacaaaggttatatagttgggatcaatgttgaggaggcagacgatgattaatattcctaaaatgaaattcccggaaaagtacactgaaataatcaaaaaatataaaaataaaacacctgaagaaaaagctaagattgaagatgatttcattaaagaaattaatgataaagacagtgaattttacagtcctatgatggctaatatgaatgaacatgaattaagggctatgttaagaatgatgcctagtttgattgataccggagatgataatgatgattaaaaaacttaaaaatatggattggttcgatatctttactgtcggaatactgtcattattcggtataaccgcattgctacttgttatcacattgcctatctatacagtggctagttaccaacacaaagaaacgcaccaaggaactattacagataaatataacaagagacaagataaagaagacaagttctatattgtattagacaacaagcaagtcattgaaaactctgacttattcttcaaaggaaagtttgacagtgcagacatacaagctaggttaaaagtaggcgacaaagtagaagttaaaacgattggctatagaatacactttttaaatttatatccggtcttatatgaagtaaagaaggtagataaacaatgattaaacaaatactaagactattattcttactagtgatgtatgagctaggtaagtatgtaactgagcaagtatatattatgatgacggctaatgatgatgtagaggcgccgagcgacttcgcaaagttgggcgatcagtgtgatttgatgagggcggaggtgtcagagtagatggaatgggtatttttttctgcttacattgttatattcattgcatgtgcatatgtgatatatagacgaattgaagaagtgagcgaggaagttgatgaattacagcgtgacataaaaaagaatgaaaaattattggaaaattataagaaagaaaacaggccaatcgaatatatcgttgagttaaaaaacggtgtgtatttacaagaaaaatatacatcgtcgtttgcggaaaggacaacgcttattacaactagtaatgtttttgaagctaaatcatatgacaatttattttcagctaaaatagatgctgaatttatgcgtggtcgtgtattaaaatataaaccgaatttagaggtggttgaatagatgatgtggttagtcatagcaattatattactagtcatcttattgtttggtgtgatgttgcaagctgaacagttaaaaggcgatgtgaaagttaaagagcgggagatagagatattaagaagtagattgagacattttgaagattaaaaatatttgtatggagggtattcatgactaaaaagaaatatggattaaaattatcaacagttcgaaagttagaagatgagttgtgtgattatcctaattatcataagcaactcgaagatttaagaagtgaaataatgacaccatggattccaacagatacaaatataggcggggagtttgtaccgtctaatacatcgaaaacagaaatggcagtaactaattatctttgtagtatacgaagaggtaaaatccttgagtttaagagcgctattgaacgtataatcaacacatcaagtaggaaagaacgcgaattcattcaagagtattattttaataaaaaggaattagtgaaagtttgtgatgacatacacatttctgatagaactgctcatagaatcaaaaggaaaatcatatctagattggcggaagagttaggggaagagtgaaattggcagtaaagtggcagtttttgatacctaaaatgagatattatgatagtgtaggatattgactatcttactgcgtttcccttatcgcaattaggaataaaggatctatgtgggttggctgattatagccaatccttttttaattttaaaaagcgtatagcgcgagagttggtggtaaatgaaatgaacgaaaaacaaaagagattcgcagatgaatatataatgaatggatgtaatggtaaaaaagcagcaattacagcaggttatagtaagaaaacagcagagtctttagcaagtcgattgttaagaaatgttaatgtttcggaatatattaaagaacgattagaacagatacaagaagagcgtttaatgagtattacagaagctttagcgttatctgcttctattgctagaggagaacctcaagaggcttacagtaagaaatatgaccatttaaacgatgaagtggaaaaagaggttacttacacaatcacaccaacttttgaagagcgtcagagatctattgaccacatactaaaagtacatggtgcgtatatcgataaaaaagaaattactcagaagaatattgagattaatattggtgagtacgatgacgaaagttaaattaaactttaacaaaccatctaatgttttcaacagaaacatattcgaaatactaaccaattacgataacttcactgaagtacattacggtggaggttcgagcggtaagtctcacggcgttatacaaaaagttgtacttaaagcattgcaagactggaaatatcctaggcgtatactatggcttagaaaagtccaatcaacaattaaagatagtttattcgaagatgtcaaagattgtttgataaacttcggtatttgggacatgtgcctttggaataagactgataacaaagttgaattgccaaacggcgcagtttttttgtttaaaggattagataacccagagaaaataaagtcgataaaaggcatatcagacatagtcatggaagaagcgtctgaattcacactaaatgattacacgcaattaacgttgcgtttgagggagcgtaaacacgtgaataagcaaatatttttgatgtttaacccagtatctaaactgaattgggtttataagtatttctttgaacatggtgaaccaatggaaaatgtcatgattagacaatctagttatcgagataataagtttcttgatgaaatgacacgacaaaacttagagttgttagcaaatcgtaatccagcatattacaaaatttatgcgttaggtgaatttgctacactagacaaattggttttccctaagtatgaaaaacgtttaataaataaagatgagttaagacatttaccttcttattttggattggactttggatacgttaatgatcctagtgcttttatacattctaaaatagatgtaaagaaaaagaagttatacatcattgaagagtatgttaaacaaggtatgctgaatgatgaaatagctaatgtcataaagcaacttggttatgctaaagaagaaattacagcagatagtgcagaacaaaaaagtatagctgaattaaggaatctagggctgaaaaggattttaccaaccaaaaaagggaagggctcggttgtacaagggttacaattcttaatgcaatttgaaatcattgttgatgaacgttgtttcaagactattgaagagtttgacaactacacatggcaaaaggacaaagatacaggtgaatataccaatgaaccagtagatacatacaatcattgtatcgattcgttgcgttattcagtggaacgattctacagaccggttagaaaacgcacaaatgtcagttcgaaagttgacacaataaaatctctaggattataggagggaacaaatgttaaaagtaaacgaatttgaaacagatacagatctacggggaaacataaattacttatttaatgatgaagccaatgttgtttacacatatgacgggacggaatccgatttattaaaaaacgttaatgaagtaagtaaatacattgaacatcacatggattaccaacgacctagattgaaagtgttaagtgattattacgaaggtaaaactaagaacttagttgagttaacacgacgcaaagaagagtacatggcagataaccgtgtagcgcatgattacgcatcttatattagcgattttatcaacggctatttcttgggtaatccaattcaatatcaagatgatgacaaagatgtattagaagctattgaggcgttcaatgatttaaatgatgttgagtcacacaatagatctttaggattagatttgtcaatttatggcaaagcttatgagttaatgattagaaaccaagatgatgaaacgcgtttatacaagagtgatgcaatgagtacttttgtcatatacgacaatacaattgaacgtaatagtatcgcaggcgttagatatttaagaactaaaccaatagacaagactgacgaagatgaagtgtttacagttgatttatttacttctcacggtgtttatagatatcttaccagtagaacaaatggattgaagctcacaccacgtgaaaacggttttgaatcacactctttcgaacgtatgcctattacagaatttagcaacaacgaaagaagaaaaggagattatgagaaagtaatcactttgattgatttgtatgataatgcagaatcagatactgctaactatatgagtgatttaaacgacgctatgttattgattaaaggtaacttatcattagatccagatgaagtaaaaaaacaaaaagaagctaacgtgttatttttagagccaaccgtttatgagaatagggatacaggtatcgaaacagaaggttcagttgacggcggttatatttataagcaatacgatgtacaaggtaccgaagcttataaagaccgtttgaacagtgatatacacatgtttaccaacacgcctaacatgaaagatgataactttagtggcactcaatcgggcgaggcaatgaaatataaattgttcggattagaacaacgtactaaaactaaagaaggattgtttactaaagggttaagacgtcgtgctaagttgttagagacaatacttaaaaatacacggtcgattgacgctaacaaagatttcaatactgttagatacgtatacaacagaaacttacctaaatcattaatcgaagaattaaaagcttatattgattctggcgggaagattagtcaaacaactttaatgtctctattctcgttcttccaagaccctgaattggaagtcaagaaaatagaagaagatgagaaagaatctattaaaaaagctcaaaaaggtatttataaagaccctagagacatcaatgatgacgaacaagatgatgatacaaaagatactgttgataaaaaggaatgattgtaattgcctaacaaaaacactcaagaatattgggaagaacgcggacgcaaagcaatcgagaatgagttgaagcgtgataaaactaaagctgaagaaatagaacgtatattgaatatgatgattaagcgcattgaaaaagaaatcaatgcgtttattgttaagtacggagattttgcaggcgttacattacaagaagcacaaaagattattgatgagttcgatgtaaaagcgtttcaagaagaagcaaaaagattggtcgaaaacaaggactttagcgatagagcaaatgaagaattaaagaagtataacactaagatgtatgtatctagagaacagatgttaaagattcaaatagaattcttaattgcttatgcaacagctcaaacagaattatcgatgagggaatatttcgaatcaacagcttatcgtgtgttcagtgatcaagcgggtattttaggtgaaggtgtacaagtagctaaagaagttatagatacaatcgttgatacacaatttcatggtgtcgtttggtcagagcgattatggactaatactgaagcgatgaaacaagaagtagaagaaataattgctaatgtggttattagaggtcgacatcctaatgaatatgttaaagatatgcgcaagcacctaaacaaattcgaaggcacagcaagacaaaagactgcagcaattaaatcattgctttatacggaatcggcacgtgttcacgcacaatcaagtattgacagcatgaaagaaatttcaccggaaggatattatatgtatattgcaaaaattgatagtagaacaactaaagtatgcaaggggcttaatggagaaatattcaaagttaaagacgctaaaattggtgttaatttctaccctatgcatatcaattgtcgttcagattgtgcattactacctaaatctatgtggccgaaaaaaccaaacaagaaacgaaaaacaaaatacttcggaggaaaagtgaaaagcgatgattgatttaaaagtaaaagtttttaaaggcaagttagcattgtatgatagtaaattaagtgtttggaggatattggtatgagcaatactgacaaatactttagagacatagcaagagagttaaaaggtatacgtaaagagttacaaaagcgaaacgaaacagttattattgatgcaaacttagacagcgtaaggtcggcagtattagccaataaagaaaaaccgaaatataacgaaccactcttttaatagctagcacttaattgtgttggctattttttatgtccaaaacgtgctgatgacataaaaagcacgcatggaaaaacagtcgacagactataaatggaggtatatctcatggaagaaaataaacttaagtttaatttgcaattttttgcagaccaatcagatgatccggacgaaccaggcggagatggtaaaaaaggaaatcctgataagaaagaatatgacgaaggtactgaaataactttcacgccagagcaacaaaagaaagttgatgaaatacttgaacgtcgtgtagcccacgaaaagaaaaaagctgatgagtatgcaaaagaaaaagcagaagaagccgctaaagaagctgctaaattagcgaaaatgaacaaggatcaaaaagatgaatatgaacgcaaacaattggaaaaagagctggagcaattacgctcagaaaaacaattaaatgaaatgcgttcagaagcaaggaaaatgttaagcgaagcagaagttgattcatcagacgaggttgttaatttagttgtaacagatactgctgaacaaactaaattgaatgttgaagctttttctaatgcagtaaaaaaagcggttaatgaagcggttaaggttaacgctagacaatcgccattgactggtggagattcatttaatcactcatctaaaaacaaaccacaaaacttagctgaaatagctagacaaaaaagaattattaaaaattaacggaggcatttaaatggaacaaacacaaaaattaaaattaaatttgcaacattttgcgagtaacaatgttaaaccgcaagtatttaaccctgataatgtaatgatgcacgaaaagaaagatggcacgttgatgaatgaattcacaacgcccatcttacaagaggttatggaaaactctaaaattatgcaattaggtaagtacgaaccaatggaaggtactgagaagaagtttactttttgggctgataaaccaggtgcttactgggtaggtgaaggtcaaaaaattgaaacgtctaaggctacttgggttaatgctacaatgagagcgtttaaattaggggttatcttacctgtaacaaaagaattcttgaattacacttattcacaattctttgaagagatgaaacctatgattgctgaagctttctataaaaagtttgatgaagcgggtattttgaatcaaggtaacaatccattcggtaaatcaattgcgcaatcaattgaaaaaactaataaggttattaaaggtgacttcacacaagataacattattgatttagaggcattacttgaagatgacgaattagaagcaaatgcgtttatttcaaaaacacaaaacagaagcttgttacgtaaaattgtagatcctgaaactaaggaacgtatttatgaccgtaacagtgatacgttagatggtctacctgtggttaaccttaaatcaagcaatttaaaacgcggtgaattaattactggtgactttgataagttgatttacggtatccctcaattaattgaatacaaaatcgatgaaactgcacaattatctacagttaaaaacgaagatggcacacctgtaaacttattcgaacaagacatggtggcattgcgtgcaactatgcatgtagcgttacacatcgctgacgataaagcattcgctaaattagtgcctgctgacaaaaaaacagattcagtaccaggagaagtttaataaataattaggagtggtaacatgcccgaaatcattggaattgttaaagtagattttacagatttagaagataacagacatgtctatatgaaagggcatgtctaccctcgcaaaggttatgatcctacagatgaacgtatcaaagctttagctagtgttgaaaataaacgcaacgaacaaatgatttacattgtaaatgacaaattaaccaaaaaagaacttgtcgaaatagcaagtgttgctggcttacaagttgatgaaaaacaaacaaaagctgaaattataaatgcttttgagtcactagagtaggtggttatatgactacgctagctgatgtaaaaaaacgtattggtcttaaagatgaaaagcaagatgaacaattagaagaaatcataaaaagttgtgaaagccagttgttatcaatgttacctattgaagttgaacaaataccggaaaggtttagttacatgattaaagaagttgcagttaaacgctacaacaggattggtgctgaaggtatgacatcagaagcggttgacggacgtagcaatgcgtatgaattgaacgatttcaaggagtatgaagctattattgataattactttaatgctagaacgagaactaaaaaaggaagggctgtgttcttttgagatatgaagatagagttatttttcaattagaacaagtagcaacttacaatcctaaaactagcaaaaaagaaaacacactaatcacttatgatgcgataccatgcaatattaatcctatttctagagcaagaaagcaacttgaatttggtgatgtaaaaaacgatgtaagtgttctgaggataaaagaatcaatatcttaccctgttagccacgtgttggttaatggcattcgctacaagatagttaatacaaggatatacagacacgaaacgtcatattatatcgaagaggtcaattgatgaatatagatggattagacgcactgttaaaccaatttcacgatatgaaaaccaacattgatgatgatgtagatgatattttacaggaaaacgccaaagaatatgtagtacgagctaaattgaaagctagagaagtaatgaataagggttattggactggtaatttatcacgcaatatcagatataaaaaaactggcgatttgcaatacactatcacatcgcatgcagcttatagtggtttcttagagtttggtactcgatacatggaggcagaaccttttatgtggccagtatatgaggtaataagaaaatcaactgtagaagaattgaaagcgttgtttgaataggagataaaagcatgacaccgaacttacaactttataataaagcgtatgaaacgctacaaggatatggattccctgttatttctcgtaaagagatgcaacaagagattccgtatcctttttttgtaataaaaatgccggagtcaaatagaagtaagtacacgtttgatagttattctggcgatacgaatttagttattgatatttggagtgtaagcgatgatttaggacatcatgacggacttgttaaaaggtgtatcgatgatttaacacctagcgttaaaacaaacgattatgactttgaagaagatgatactaacatcgcacagttagtcgatgatactactaatcaagaattgctacacacatcaataacgatatcttacaaaacattttaaaaaacggaggaatattgaatggcgaatatgaaaaatagtaatgaccgtattattttgtttagaaaagctggcgaaaaagtagatgctactaaaatgctttttttaactgaatacggcttatcacatgaagctgatacagatacagaggatacgatggatgggtcttataacactggtggttcagttgaatcaacaatgtctggtactgctaaaatgttttatggtgacgattttgcagatgaaattgaagatgcagttgtagatcgcgtattgtatgaggcttgggaagttgaaagtagaataccaggcaaaaatggagatgctactaaatttaaagcgaaatatttccaaggtttccacaataaatttgaattaaaagcagaagctaacggtattgatgaatatgaatatgaatatggagtgaatggtcgtttccaacgtggatttgcaacactacctgaggctgtaacaaagaaacttaaggcgactggatacagattccatgacactacaaaagcagatgcgttaactagcgaagatttaaccgcaattccacaacctaaagtagattcatcatcggttacaccaggagaggtataaaaatagggcttaacgccctttttatttttgtttaaattaatcatgaatggagattttaaattatgaatgtagaaattaatggaaagtcattagagttaagttttggttttaaatttttaagagaaatcgataaccgattaggtttaaaagttgaacaagcttctatcggtcaaggtgtatcaatgttgcctgtaggtttagaaagtggaaatcctgttgtgattggcgaagttttaattgcagctacatctcacttaaaaaaacaagcaattactattaataacattgatgaagcactagatgaaatcgcagaaaatatcggactagaagaattcggttcagatattttaacggagttgggaaagcgacctatgacccgaaacctagtcgaagtagtggaaacggaagagaaaccagcggaagcctaataacttacgacagaatcgttataacttgtatgtcaacacttggtattacagatttgaacgttattgagcaaatgacattaacagaatataactatcgaatgtatgcgaaagagtatgaaatgctaacccaagaattcgaacgttacaaacttgcgtttgctattcgtgatgctgcagctactaaaaatgttgggacagaaaataaacctaaagaggaatatgtttttaacaacgcaaacgacgtattgccttatgaagaaaatatccaacggcttaacgaaggtaaagatataagatttagtagcgaacgtgatgaatacgaaccacaaaataatgaattctttaaagttatagcagaatttaacaagcaatagaaagagaggtgttaatgtgacggaatataaaattaaagcgactattgaagctagtgtagccaaattcaaaaggcaaatcgatagtgcggttaagtctgtgcaaagatttaaacgagtagcagatcaaactaaagatgtcgaattaaatgctgatgataaaaaattacaaaaaactatcaaagttgctaaaaagtctttagatgcctttagtaacaaaaaagtaaaagctaaattagatgctagtatacaagacttgcaacaaaaggtactagaatcgaattttgaactagacaaactaaactctaaagaagttactccagagattaaattacaaaaacaaaaattgactaaagatatcgctgaagcagaagctaagttatccgaactagaaaagaagcgtgtcaatattgacatcaatgctgataacagtaaattcaatcgagtgttaaaagtatctaaagctagtcttgaagctttaaataggtctaaagccaaagctattttagatgtagacaacagtgttgctaattctaaaatcaaacgtactaaagaagagcttaaaagtattccaaataaaactagatctcgacttgatgtagatacaaggctttctataccaactatttatgcgtttaaaaaatcattagacgcattgccaaacaaaaaaacaacaaaggtagatgtcgatactaatggtttaaagaaagcttatgcctacataataaaagcaaacgacaatttccaaagacagatggggaatttagctaatatgttccgtgtgttcggtactgtaggttctaatatggttggtggattactaacttcatcttttagcattttaatacctgtaatagcgagcgtagtacctgtagtgtttgcactattaaacgctatcaaagtgttaactggtggtgtacttgctttaggtggtgctgtagcaatagctggtgctggctttgtagcatttggcgcaatggctatcagcgctataaagatgcttagtgacggcactttacaagctagctcagcaacaaacgaatacaaaaaagctttagatggcgtaaagtcagcatggactgatattataaagcaaaatcaatccgctatcttcacaactcttgcaaatggtttaaatactgttaaaacagcaatgcagagcttacaaccgttttttagtggtatttcaagaggaatggaagaggcgtctcaaagtgtacttaaatgggctcaaaatagcggtgtagcatcaaggttcttcaacatgatgaatacaactggtgtttcggtatttaacaagctattaagtgctgcaggcggtttcggtgacggtttagtcaatgtattcacacaattagcaccactgtttcaatggtcggctgattggttggatagattaggtcaatctttctctaactgggctaatagtgcagctggagaaaattcgattactcgttttattgaatacacaaaaacaaatttacctatcattggtaatatttttaaaaatgttttcgctggaattaacaatttgatgaatgcatttagtggatcgtcaactggtatattccagtctctcgaacagatgacagctaaatttagggaatggtctgaacaagtaggacaatctcaagggttcaaagactttgtcagttatatacaaacaaatggaccactaataatgcaattaattgggaacattgcaagaggattagttgcattcgcaacagcgatggctcctatagctagtgcagtattacgcgttgcagtagcaataactggttggatagctaacttgtttgaggcgcatccagctacagcacaattagttggcgtcattataactttagttggtgcatttagatttttaattgctccaatattagcggtaatggattttctggggccattagcagcaagattagtcgcattagtaactaagtttggttgggctaaaacaggaactttagtattaagtaaggcaatgacatcattaaaaggtccaataaaattagttacagctatattccaattgttattcggtaagattggattaattagaaatgctatcacaggactagtaactgtgtttggtattttaagtggtccaataacaatagtaattggtgtaatcgctgcattaatagctatatttgttttattgtggaataaaaatgaaggattcagaaactttattataaatgcttggaatgcgataaaaacatttatggttacagtttggaatgtgttgaaaactgtagcttcggttgtatggaatgctattttaaaagctatcactacagcagtatcaaatgtatacaattttataatgattatttggaatcaaatagttgcttatttgcaagggctatggaatggaattatcgctattgcaacaacagtatggaaccttttagttacaatcatcacaactgttttcacgacgataatgacaatagttatgacgatatggacagctatttggacattcttaagtacaatctggaacacgataattacaatcgctactacgatttggaatttgttagtcactgtaataactacagtatttaccacaattatgactatcgcaatgacaatttggaacgctatttggacgttcttacaaacgttgtggaacactatagttactgtggcaactaaggtttggaacgctatcactacaactatatctactgcgttacaagcggcatggagttttatttctaatatatggaatacgatttggagtttcttatctggtatattaacgacaatttggaataaagttgtaagcatattcacacaagttgtatcaactatatcagacaaaatgtctcaagcttggaacttcatcgtgactaaaggtatgcaatgggtatctactataacaagtacgctaattaactttgttaatagagttattcaaggattcgttaatgttgtaaacaaagttagtcaaggtatgacaaatgcagtaaataaagttaaaagctttgtggatgactttgtatcagcaggtgctgatatgatccgtggtttgatgagaggtattggtaatatggctagagacttagctgaaaaagcagctagtgtagcaaaaggtgctttaaatgcagccaaaagagcgctaggtattcactcaccttcacgtgaattcatggatgttggtatgtattcaatgttaggtttcgttaaaggtatagataatcattcaagtaaagttatccgtaatgtttctaatgttgcagataaagtagttgatgcatttcaacctacattaaacgcacctgacatttctagtattacaggaaacttaagtaatttaggtggaaatataaatgcgcaagtacaacacacacattctattgaaacatcaccgaacatgaaaactgttaaagttgaattcgatgtcaataacgatgcgcttactagtattgttaacggcagaaatgctaaacgcaattctgagtattacttataaaggaggttacaaatggacatagaattaacaaaaaaagatggtactgtaatcaaattaagtgaatacgggtttatcgttaacgatatagtaattgatagcatgcaaatcaacacaaagtatcaagacaaagaaaatatgaacggtcgtatattaatggggagcaattatatcagtagagatatagttgttccttgtttttgtaaagttaaaaatcgttcagacattgcttatatgcgagatatgttgtattcgttaacgacagacatagaacctatgtatttgcgagaaatcagaagaaaagaagagttgaattacaggtttactcaaccaacttctgatgattacgtgaaattagataaaaacaacttcccggattatgaatattcaagacacgatcaacaaatttatgtaaatggtaaacagtataaagttatttttaacggagttataaaccctaaacaaaaaggtaataaagtttcttttgaactaaaattcgaaactacagaattaccatacggtgaaagtattggaacaagcctagagttagaagaaaacaaaaaggttggattgtggtcgtttgattttaatattgattggcatgcaggcggagacaaaagaaagtatacatttgaaaatttgagcaaaggtacagtttactatcacggtagtgctcctaacgaccaattcaacatgtataaaaagataacaattattttaggcgaagatacagaatcgtttgtatggaatttaacgcatgctgaaataatgaaaatcgaagggatcaaactaaaagctggagacagaattgtttatgatagcttccgagtttataaaaacggtgtcgaaataagcactgaaacgaacatagcccaaccaaaatttaaatacggagctaataaatttgagtttaatcaaacagttcaaaaagttcagtttgatttgaaattttattataagtaggtgtcagaatgacaataattgtaagaccacctaaaggtaatggcgcacctgtaccagtagaaacaactttagtaaaaaaagttaacgctgacggtgtattaacttttgatattctagaaaacaaatatacttatgaagttattaacgctatagggaaaagatggattgttagtcatgtcgaaggtgaaaacgacaagaaagaatatgtaataactgtcattgataggaaatcagaaggcgacagacaactggttgaatgtactgctagagagattcctatagacaagttaatgattgataggatttatgttaatgtaacaggatcttttacagtagaaagatattttaacattgtgtttcaaggtactggaatgctttttgaagtcgaaggtaaggttaagtcttcgaagtttgaaaatggtggtgaaggcgatacaaggttagaaatgtttaaaaagggattagaacatttcggtttagaatataaaataacgtatgacaaaaagaaagacagatataagtttgtattgacgccttttgcaaatcaaaaagcgtcttattttatttctgacgaagtcaacgccaacgctataaaactcgaggaagatgcaagtgatttcgccaccttcattagaggatatggtaattattcaggagaagaaacattcgaacacgctgggctcgtaatggaagctagaagtgcattagctgaaatatacggcgacatccacgcagaaccatttaaagatggtaaagtgactgaccaagaaactatggataaagaattacaatcgagattgaaaaagtcgttaaaacaatctttgtctttggactttttggtgttaagagaatcatatccagaagcagacccacaacccggagacatagtacaaataaaatctaccaaactaggtttgaatgatttagtccgtatagtacaagttaaaacgattaggggtataaacaatgtaattgttaagcaagatgtaacgcttggtgagtttaatcgagaacaacgatatatgaaaaaagttaatactgcagctaactatgtttctggattaaatgatgttaacctttctaatcctagtaaagcggcagaaaacttgaagtctaaagtagcgtcaatagctaaatcaacactcgatttgatgagtagaactgatttgattgaagataaacaacagaaagtgagttctaagactgtaactacatcagatggcactatcgttcacgattttatagataaatcaaacattaaagatgtaaaaacgattggaacgattggcgattctgtagctagaggatcacatgcgaaaactaatttcacagaaatgttaggcaagaagttaaaagctaaaacgaccaaccttgcaagaggtggcgcaacaatggcaacagttccaataggtaaagaagcggtagaaaacagcatttatagacaagcagagcaaataagaggagacctaatcatattacaaggtacagatgatgactggttacatggttattgggcaggcgtaccgataggcactgataaaaccgacactaaaacgttttacggcgccttttgttctgcaattgaagttatcaggaaaaataatccagcttcaaaaatacttgtaatgacagctactaggcaatgccctatgagtggtacaacgatacgccgtaaagatacggacaaaaacaaactagggttaactttagaggattatgtcaatgctcagatattggcttgtagtgaattggatgtaccagtatatgatgcctatcatacagattattttaaaccatataatccagcgttcagaaaatcaagtatgccagacggattgcatccgaacgagaggggtcatgaagttattatgtacgaacttattaaaaattattaccagttttacggatagaaaaggaggaagacatggataacaaattaattacagacttaagtagagttttcgattacagatatgtagatgaaaatgagtataatttcaagcttatttcagacatgctgactgattttaatttctctcttgaatatcatagaaataaagaggtatttgcacataatggagagcaaataaagtatgaacatttaaatgttacaagtagcgtctctgactttttaacatatttaaacggtcgatttagcaacatggtactaggtcataacggcgacggtatcaacgaagtaaaagacgcgcgtgttgataatactggttatgatcataagacattgcaagatcgtttgtatcatgattattcaacactagatgctttcactaaaaaggttgagaaagctgtagatgaacactataaagaatatcgagcgacagaataccgattcgaaccaaaagagcaagaaccggaattcatcacagatttatcgccatatactaacgcagtaatgcaatcattttgggtagaccctagaacgaaaattatttatatgacgcaagctcgtccaggtaatcattacatgttatctagattgaagcccaacggacaatttattgatagattgcttgttaaaaacggcggtcacggtacacacaatgcgtatagatacattgatggagaattatggatttattcagctgtattggacagtaacaaaaacaacaagtttgtacgtttccaatatagaactggagaaataacttatggtaatgaaatgcaagatgtcatgccgaatatatttaacgacagatatacgtcagcgatttataatccggtagaaaatttaatgatttttagacgtgaatataaacccactgaaagacaacttaagaattcgttgaactttgttgaggttagaagtgctgacgatattgataaaggtatagacaaagtattgtatcaaatggatatacctatggaatacacttcagatacacaacctatgcaaggtatcacttatgatgcaggtatcttatattggtatacaggtgattcgaatacagccaaccctaactacttacaaggtttcgatataaaaacaaaagaattgttatttaaacgacgtatcgatattggcggtgtgaataataactttaaaggagacttccaagaagctgagggtctagatatgtattacgatctagaaacaggacgcaaagcgcttttaataggggtaactattggacctggtaacaacagacatcactcaatttattccatcggccaaagaggtgttaaccaattcttaaaaaacattgcacctcaagtatcgatgactgattcaggcggacgtgttaaaccgttaccaatacagaacccagcatatctaagtgatattacggaagttggtcattactatatctatacgcaagacacacaaaatgcattagatttcccgttaccgaaagcgtttagagatgcaggttggttctttgatgtactgcctggacactataatggtgctctaagacaagtacttaccagaaatagcacaggtagaaatatgcttaaattcgaacgtgtcattgacattttcaataagaaaaacaacggagcatggaatttctgtccgcaaaacgccggttattgggaacatatccctaagagtattacaaaattatcagatttaaaaatcgttggtttagatttctatatcactactgaagaatcaaaacgatttactgattttcctaaagactttaaaggtattgcaggttggatattagaagtaaaatcgaatacaccaggtaacacaacacaagtattaagacgtaataacttcccgtctgcacatcaatttttagttagaaactttggtactggtggcgttggtaaatggagtttattcgaaggaaaggtggttgaataatggtagtagataatttttcgaaagatgataacttaatcgagttacaaacaacatcacaatataatccggttattgacacaaacatcagtttctatgaatcagatagaggaactggtgttttaaattttgcagtaactaagaataacagaccgttatctataagttctgaacatgttaaaacatctatcgtgttaaaaaccgatgattataacgtagatagaggcgcttatatttcagacgaattaacgatagtagacgcaattaatgggcgtttgcagtatgtgataccgaatgaatttttaaaacattcaggcaaggtgcatgctcaggcattctttacacaaaacgggagtaataatgttgttgttgaacgtcaatttagcttcaatattgaaaatgatttagttagtgggtttgatggtataacaaagcttgtttatatcaaatctattcaagatactatcgaagctgtcggtaaagactttaaccaattaaagcaaaatatggctgatacacaaacgttaatagcaaaagtgaatgatagtgcgacaaaaggcattcaacaaatcgaaatcaaggaaaacgaagctatacaagctattactgcgacgcaaactagtgcaacacaagctgttacagctgaattcgataaaatagttgataaagagcaagcgatttttgaacgtgttaacgaagttgaacaacaaatcaatggcgctgaccttgttaaaggtaattcaacaacaaattggcaaaagtctaaacttactgatgattacggtaaagcaattgaatcgtctgagcagtccatagatagcgttttaagcgcaattaacacatctaggattattcatatcactagcgcaacagatgcgccaacatttaaagatataggcactttagagacgcctaaagaagatggcgttgatgatggttctgaagtttcagcaactacgaatactttagggaaatcaggcttgttagttgtttatgttgttgatgacagtacagctcgtgctacatggtatccagacgattcaaatgatgagtacacaaaatataaaatcggtggcacatggtatcagttctataaaaaagttgacgaagaattaacgaagaaatttgttgaagaaacggctaacaacgctttaaatcaagctaagcagtatgtagatgataaattcggaacaacgagctggcaacaacataagatgacagaggcgaatggtcaatcaattcaagttaacttaaataatgcgcaaggcgatttgggatatttaactgctggtaattactatgcaacaagagtgccggatttaccaggtagcgttgaaagttatgagggttatttatcggtattcgttaaagatgatacaaacaagctatttaacttcacaccttataactctaaaaagatttacacacgatcaatcacaaacggcagacttgagcaacagtggacagttcctaatgaacataaatcaacggtattgttcgacggtggcgcaaatggtgtaggtacaacaatcaatctaactgaaccgtacacaaactattctattttgttggtaagtggaacttatccaggtggcgttattgagggattcggactaaccgcattacctaacgcgattcaattgagtaaagcgaatgtagttgactcagacggcaacggtggcggtatttatgagtgcttactatccaaaacaagtagcactactttaagaatagataacgatgtgtactttgatttaggtaaaacatcaggttctggagcgaatgccaacaaagttactataactaaaattatggggtggaaataatgaaaatcacagtaaacgataaaaacgaagttatcggattcgttaatactggcggtttacgcaatagtttagatgtagatgataacaatgtgcctattaaatttaaagaagagttcgaacctagaaagtttgttttcactaacggcgaaattaaatacaatagcaatttcgaaaaagaagacgtaccgaatgcatcaaaccaacaaagtgcgtcagatttaagtgatgaggaacttcgcggaatggttgcgagtatgcaaatgcaggtggcacaagtaaacgtattaacaatggaattagctcaacaaaacgctatgttaacacaacagttgactgaactgaaaactaacaaaacaagtactgagggggacgtttaaataatgaagatgatttatccaacttttaaagacattaaaactttttatgtttggggttactataaaaacgagcaaattaagtggtacgtagacaagggtttaatcgataaagaagaatacgctttaatcactggagaaaaatatccagaaacaaaagatgaaaagtcacaggtgtaatgcttgtggctttttaatttgaataaagtgggtggcataatgtttggatttaccaaacgacatgaacaagattggcgtttaacgcgattagaagaaaatgataagactatgtttgaaaaattcgacagaatagaagatagtcttagagcgcaagaaaagatttatgacaaattagatagaaattttgaagaattaaagcgcgacaaggtagaagatgaaaagaataaagaaaagaatgccaagaatattagagacataaaaatgtggattctaggtttgatagggactatcttcagtacgattgtcatagctttactaagaactgtttttggtatttaaaggaggtgattaccatgcttaaagggattttaggatatagcttttggtcgtgtttctggtttggtaaatgtaaataacagttaagagtcagtgcttcggcactggctttttattttgattgaaatgaggtgcatacatgggattacctaatccgaaaaatagaaagcccacagctagtgaagtggttgaatgggcgttatatatcgctaaaaacaaaatagctattgatgtacctggttctggaatgggagcacaatgctgggatttacctaattatttactcgataaatattggggatttagaacatggggaaatgctgatgctatggctcagaaatctaattatagaggtagagatttcaagataattagaaatacaaaagactttgtaccacaaccaggcgactggggtgtttggactggtggttgggcaggtcatgtgaacattgtagtagggccatgcacaaaagactattggtatggtgtggatcaaaactggtatacaaataatgcaacaggaagtccgccgtataaaatcaaacactcttatcatgatggaccaggtggaggagttaaatattttgttagaccaccatatcatccggagaaatctacgccggcacctaaaccagaagatgatagtgatgataacgaaaaaaataataaaaaagttccaatttggaaagatgtaacaactataaagtacactatttctagccaagaggttaattatccagaatatatttatcactttatagtagaaggtaatcgacgactcgaaaaacctaaaggaataatgattagaaacgcacaaacgatgagctcggtagaaagtttatataacagtaggaagaaatacaaacaggatgtagaatatccccacttttatgttgacagacataatatttgggcacctagaagagctgtatttgaagttcctaatgaacctgattatatagttatagacgtatgtgaagattatagtgcgagtaaaaatgaatttatttttaatgagattcacgcaatggttgtagctgtagatatgatggccaaatatgagatacctctaagtattgaaaatttaaaagtagacgacagcatttggcgttcgatgttggaacatgttaattggaatatgattgacaacggtgttccccctaaagataaatacgaagcattagaaaaggcattacttaatatatttaaaaacagagaaaaattattaaattctataactaaaccaacagtaacaaaatctagaataaaagttatggtagataataaaaacgctgatatagcgaatgtaagagactcatcaccaacagctaataatggctcggcatctaaacaaccgcagatcataacagaaacgagtccttatacattcaaacaagcactggataaacaaatggcaagaggtaacccgaaaaaatctaatgcttggggttgggctaacgctacacgagcacaaacgagttcagcaatgaatgttaaacgaatatgggaaagcaacacgcagtgctaccaaatgcttaatttaggcaagtatcaaggcgtttcagttagttcgcttaataagatacttaaaggtaaggggacattgaataatcaaggtaaagcgttcgcagaagcttgtaaaaagcacaacattaatgaaatttatttaatcgcgcatgctttcttagaaagtggatatggaacaagtaacttcgctaacggaaaagatggagtatacaactacttcggtattggcgcttacgacaacaatcctaactacgcaatgacgtttgctaggaataaaggttggacatctccagcaaaagcaatcatgggcggtgctagcttcgtaagaaaggattacatcaacaaagggcagaatacactgtacagaatcagatggaatcctaagaatccagctacgcaccaatacgctactgctatagagtggtgccaacatcaagctagtacaatcgctaagctatataaacaaatcggcttaaaaggtatctattttataagagataaatataaataaagaggtgtataaatgtacaaaataaaagatgttgaaacgagaataaaaaatgatggtgttgacttaggtgacattggctgtcgattttacactgaagatgaaaatacagcatctataagaataggtatcaatgacaaacaaggtcgtatcgatctaaaagcgcatggcttaacacctagattgcatttgtttatggaagatggctctatattcaaaaatgagccccttattatcgacgatgttgtaaaagggttccttacctacaagatacctaaaaaggttatcaaacacgctggttatgtacgttgtaagctgtttttagagaaagaagaacaaaaaatacatgtcgcgaacttttctttcaatatcattgatagtggtattgaatctgctgtagcaaaagaaatcgatgttaaattggtagatgatgctattacgagaatcttaaaagataacgcgacagatttattgagcaaagactttaaagagaaaatagataaagatgtcatttcttacatcgaaaagaatgaaagtagatttaaaggtgcgaaaggtgataaaggcgaaccgggacaacctggtgcaaaaggtgaagcaggtaaaaaaggagaacaaggcgtacccggtaaaaacggtactgtagtatcaatcaatcctgacactaaaatgtggcaaattgatggtaaagatacaaatatcaaagcagaacctgagttattggacaaaatcaatatcgcaaatgttgaagggttagaagataaattgcaagaagttgaaaaaaacaaagaggcaactctcaaagactctaaaacgtatacagattcaaaaattgctgaactagttgatagcgcgcctgaatctatgaatacactaagagaattagcagaagcaatacaaaacaactctatttcagaaagtgtattgcaacagattggctcaaaagttagtacagaagattttgagaggttcaaacaaacattaaacagtttgtatgcagataaaaatcatagtcatacaatcaaacagattgaaggattagaaaatgctttatcaagaaaatcagacataaatcataatcatgacgagaggtatgttttgtcgtctcaagcttttactaaacaacaagcggataatttatatcaactaaaaggcgcatctcaaccgacggttaaaatttggacaggaacagaaaatgaatataactatatatatcaaaaagacccgaatacgttatatttaattaaagggtgatgacatggaagctaatttaaaaggtgtaaagaaattggtatacaaaggggttgaatactctaaagtatttgcaggtaatacaaaagtttggtctaaaccgccgtcttttgtaattaaacccttacctaaaaataaatatccggatagcatagaagattcaacagcaaaatggacaataaatggagttgaacctaacaaaaattatcaggtgacaatagaaaatgtacgcagcggtataatgagggtttcgcaaactaatttaggatcaagtgatttaggaatatcaggagtcaatagtggagttgcaagtaaaagcattaactttagtaatccttccgggattttgtatgtcactataagtgatgtttattcaggatctccgactttgaccatcgaataattttaaacgactaatttttagtcgttttttattttgggtaaaaggagcaaacaaatggatattaactggaaattgagatttaaaaataaagcagtattaacaggtttagttggtgcattgttgctatttatcaagcaaattacagacttattcggattagatttatcaactcaattaaatcaagctagcgcgattataggtgctattctcacgctactcacaggtattggtgttattactgatccaacgtcaaaaggcgtctcagattcatctatagcacagacatatcaagcgcctagagatagtagcaaagaagaacaacaggttacttggaaaacatctcaagacagtaatttaacgccagaattaagtacaaaagcaccgaaagaatatgatacatcacagccgtttacagacgcctctaacgatgttggttttgacgtgaatgagtatcatcatggaggtggcgacgatgcaagcaaaattaactaaaaaagagtttatagaatggttgaaaacttctgagggaaaacaattcaatgtggacttatggtatggatttcaatgctttgattatgccaatgctggttggaaagttttgtttggattacttctaaaaggtttaggtgcaaaagatataccatttgcaaacaattttgatggactagctactgtataccaaaatacaccggacttcttagcacaacctggcgacatggtggtattcggtagcaactacggtgctggatatggtcacgttgcatgggtaattgaagcaactttagattacatcattgtatatgagcagaattggctaggcggtggctggactgacggaatcgaacaacccggctggggttgggaaaaagttacaagacgacaacatgcttatgatttccctatgtggtttatccgtccgaattttaaaagtgagacagcgccacgatcagttcaatctcctacacaagcacctaaaaaagaaacagctaagccacaacctaaagcagtagaacttaaaatcatcaaagatgtggttaaaggttatgacctacctaagcgtggtagtaaccctaaaggtatagttatacacaacgacgcaggaagcaaaggggcgactgctgaagcatatcgtaacggattagtaaatgcacctttatcaagattagaagcgggcattgcgcatagttacgtatcaggcaacacagtttggcaagccttagatgaatcacaagtaggttggcataccgctaatcaaataggtaataaatattattacggtattgaagtatgtcaatcaatgggcgcagataacgcgacattcttaaaaaatgaacaggcaactttccaagaatgcgctagattgttgaaaaaatggggattaccagcaaacagaaatacaatcagattgcacaatgaatttacttcaacatcatgccctcatagaagttcggttttacacactggttttgacccagtaactcgcggtctattgccagaagacaagcggttgcaacttaaagactactttatcaagcagattagggcgtacatggatggtaaaataccggttgccactgtctctaatgagtcaagcgcttcaagtaatacagttaaaccagttgcaagtgcatggaaacgtaataaatatggtacttactacatggaagaaagtgctagattcacaaacggcaatcaaccaatcacagtaagaaaagtggggccattcttatcatgcccggtagcttaccaattccaacctggtggatattgtgattatacagaagtgatgttacaagatggtcatgtttgggtaggatatacatgggaggggcaacgttattacttgcctattagaacatggaatggttctgccccacctaatcagatattaggtgacttatggggagaaatcagttagaatgacatagtcatgtctatttaagcaggtgcgttacacacctgctttctatttacatttaaagataaaatgtgctattattttactagaactttttaacatttctctcaagatttaaatgttgataacaggcaggtacttcggtacttgcctatttttttatgcaaaaaaacgaaaaaagtttataaaaagtattgcatatcacgtttaaccgtgttataataaggtatgccagttgagaggaggataaaaagtgttagaaaattttaaaactatagcagaaatcgccttttatacaatgtcagcaattgccatagcgaaaacattgaaaaaagacgataagtaagtagacaagcccgaaagggctgtctatatataaattctaacactaaaatactatgaaaacaatttacattattttaatcattcttatttggataaacgtgtttttaggcaacgatataagtaaaagtgttgttgcactgcttactactttactgcttatcaatttatggaagagggataaaaatgacagcaataaaagaaataattgaatcaatagaaaagttattcgaaaaagaaacgggatataaaattgctaaaaattccggattaccatatcaaactgtgcaagatttaaggaatggaaaaacatctttatcagatgccagattcagaacgataataaagttatacgagtatcaaagatcacttgaaaacaaagaagatacatagaggagctaaaaaatatgtttgttacaaaagaagaatttaaaaatttgaatgtaaaagaagtatttgaatcaggaaaaaactttataaaaatcacagatggaagacatgcaatatattgggtaaacgatagatacgtagtacttgatcataaaaaaggcgatttgtacccgcaaaaagcatacccaaaatatatcgaaagaaaattagtaagttaaacaaatagaaaccacgtcttaattgacgtggttatttttgtatggaagtttgtacacttcgtatttatacaagtgcctccatacattttcgaagattgttcgataactgcgacgtgttgacctgttgatgcagcgtatttcgctaaagttttaccagctttcccaaatcctattacaattaaatcatatgttttcatgacataaatcctccttttgaatgtcttcaatgacatctttgattgtttttccattataaaaattaataatgatattctgttcgtcttgctgataatgtgacatggtagttgcaatattacgagcaatttgacagtgactgccttcgtcgccagtaaatagacgtgtgtggtgttctttctctaagacaaaatgtttatataatgttgctagagagacatcagcactttgatcatttgctaaataaccgccatctttacctcgtattgtgtcaatcatttttaaatcgacaagttgagtcgtcacgcgtcgtaattgaacaggatttaaacaagttaattctgctaatgaactactattgaatttttctgaatgatgcttagttaaaaaagctaatacatgcacggcaatgttaaattctaaattcaatgtttctcacctcataattgtaactgtattagttacaattaaaaatcattttgctcaatgtgtcaatacttatgtttgaaaagtgttgaattaggtgtggttattgtgatgatttattgtttgaaagttgatgcattaacggtgagattgcacaattgaaattttaattatgtatgaactgatagatatgaaatgaatattgaaaatgagagcaataaaattttgaatgatgatgttgtgtgattgtataaacttattcgtattttagatacgttttgatatttcgcatgatgaggaaatacttttaacaactgatgacatattttaatagtgaatatattttgagatattaatatatttaatgttaaggatgttgtcgcaataaaattaaaatattgaaagataatttttattgattaattgcgaatatacaaagacaccattatatccatatgctaaaataagaaaaaaggcgacatgttatctcaatttacctgcatctagactcctttacataagaaataatcatcgccgagttttaaaattttacaactttgtagatgtaaaaagcatttgattttaaatagtttgaaaatcatatatttttgaaaaaggagcatgccgatgagtattgacatgtatttagacagatctcgaaaccaagcttcaagtgtggggaatttgagtcaaacaatgaattcaaattatgatgcgttggaaaaagcaattactcaatttattaatgatgatgcgcttaaagggaaagcgtatacgtcagctaagcaattttttagtacggtgttaattccattatcaacaagtatgaaaacattgagtgatttaacgaagcaagcttgcgataattttgtgtcacgttatacgagtgaggttgatagcatatctttaaaagaatcagagcttgaagaagatatcagatcattaagtcaacaaattacgcgatatgaaaatttgaataacaatttgaaaaagcatgcttccgataatcagcaagccatttcatcgaaccaacaaataatacgaacattaggtcaacaaaaacatgaattagaagagaagctacgcaaattgcgtgagtttaatcaaaaatcaccagaaatatttaaagaagttgaagaatttcaaaaaattgtccaacaaggacttacccaagcgcagaatttttggaacttttcaacaaatcaatttaatataccttcaggtaaagaacttgattgggctaaagcaagtcatgaaaaatatttgaaagttgctatggggaaaattgaacataaagcagagaaagaaactttaaataaagcagactttgctgttataaaggcatatgccaaagagcatccagaagacgatatcccgaaaagtataatgaaatatataaatgacaataaagacagtattaaaagagatataggattagatatcacttcaacacttttagagcaaggcggtataaatgcaagtaaattcggtgtatttatcaatacagcaggtggagtgaaaggcccagccggtccaaattcatttgtggaagtcaaacgtacatcaggtaatgtgtttatagaaaatggtagtaaatttgctaaaggtggaaaatatctaggtaaaggtgttgcaggtgtaggatttggtataggtatgtatgatgaccttgcaaatgatgataaaacatttggggaggcgttgtcgcataatgctttaactacaggaataggtactggtgctggaattgctacttcagcaacaatagtcgcacttgctagtaacccagttggttgggctgctttaggaggtttggcagtaggtattggagctacccaccttgctgattgggcttaccaagcaaatattttggggttaaaagataaaactgattgggttggacataagatagatgaaggtattgataatttcaaaaagtcaacggtaaatacagtagatagcattggaaatgtcgttggtgaagctacaaaaagtattagcaatcatataaaccctatgaaatgggagtggtaagtgttgatttgtgaatcaaaaaatataaataagaacccgagatataaaattataaaatataagaacgagtttttaatggttgatgtaactagttcttggattttcttcttcattccaatgcttaattggggtgtacctaagaaatatgcgaagattagtcaaagtgagtttgaagaattaaatacatttacaccgaaaaatagtagctcagctggatggatagcaggtgggggatcagttttattggcagtattgacgagaaaatatatacagttgttaaatatacaagttaatcaaattgctgtaaatattttatgttgtctcgtacttttgggggttttcctttcagctttatatattaattcgaaatctaaattaaatgtttatgatagaaataactgtgatgaaaagataattttaataccaacttttaaaaatttatgcttaatgctcctttcgtatattatttttggtggtttaagcatacttgctttttatatgtttatcacagaaggtattcaaaacatcattttatttattacttggattatgcttgtaataatgttcttacttagtaatgtagctttggtagtcaataaaaaagtatatgttataaaaaggtagaaaaatgactaacaatattatgttaaccgttcttcaaataaagattactaagtaaaagtaggaagtgataaacagtgctttgtgaatctcgagtcattaataaaaacccaaaatacaggatcattaaatataatgaggagtatttcatggttgatttagtaagtacttggattgcttattttttgcccatgattaattggtttattcccaaaaagtacgtgaaaattagtagagaagaatttgaaagtttaaatattgtcaaacccgctaaaaataatactttctggcctgttgcaggatttgcagtgttattaacaaccttaacaagaaaatatatttatttgcttaatatccatttagaaaaagaattagttatattaacatgctgcatgatacttctaggtgttttcgcattgtttatatatataaatacaaaattgaagttacatatttttgataaaaataaaagtaataacgaaaagatcatattaatacctacatttaaaaatatttgtttatctttatttgcttatatattatttggtggattgtcaacaatggctctgagtatgttagtaacttcatcccctcaaaatataatagaatttcttgctttaattggcatgactgcatgcttctttctactgaatatgtcatcggttttagataaaaatattcatgttattttaaaaacaaataagtagtaaaattgattaacttaggtagtatcggatacttaaatgttggttcataaaaagcaatgattttaaatcgaggagctatcttagaacagggaaataaaacagctaaagttataaaaagcgaattaataactaattatattatgttagccactcttcaaataaaaaataattagaataaggtggaattgataatcaatgctatgcgaatctaaaatcatcaataaaaatccaaaatatagaattattaaatataatgatgagtacttaatgatcgatataataagcacttggattagtttgttttttccttttattaattggttcatcaccaaaagatacgtcaaaattagtagagaagagtttgaaaatttaaatattgttaaacctgctaaaaagaatgttttttggccagttgcaggtatctctactttattcgcagttacattaagaaagtatacgcatttacttgacactcaacttgataaaaaattagttattgccatatgttgtatcacatttatagggattttaatattttatgtacgcctaattaaaaaatcatctttaaatatttataatactaaaaataaaaggtcgaaaatcatcttaataccaacactaaaaaatttttgtttcacattgttcggatatgtttttttaattttttggacagtggttttctcatatgctctattatcaatgagttatcaaaacataatagtatattttgcttggattacagcaataatgggtttttttctagtgaatatagctttaattatagataaaaacattcatgtcatacttaaaaattaaatggtggtaataaattcagattaaagatatgcaaataacaatgaataaaatttttaatgatagtaagttgataatattttaatgtcttttgaagtatcgaaaaatgtattacacataaaattaaagggatgtggagacattggtttgcgaggtaatagctatatacaaaaatcccaaatatagaattattaaatataatgatgaatatttgatggtgaatataataaataattggttagttttattcattccattgcttaattggttgacaccaaaaagatacatcaagatcagtcaagaagaattagaaagtttaaatactttcaaacctgctaaaaacaatgcattttggccagcattaggtagttcagttttatttagtgtgacttttagaaagtatatgcctttatttaatgttagattggaaaaaacaatagtaatagccatattttttgttgtatttcttggtattttatttttctacctaaatttaaatcgtaggctagcattaagtgtttttactatgaataaagaaaaaagtcagaaaatgatattgctacctaatttaaaacattttttctttataatatttgcatatttatatttcggtggtttttcatttttcactttatatgccctgataactatagatgttcaaaatataattatatttatctgttggggtgcagtaactatgtttttcttttttataaacattgttcccattggcattaaaaaagctcatgtaatacttcttaaaaaagctgaataataaatgagttttttaaatctaaaattattaaatttaatataaaaatttgactcatagatagaatgaataaaaatccgaaatatagaattatcaactacaaagatgaatattttataatggatatcccatgttaatattaacagttttaatttctttgttatgcaaatcaaaacattatagtatttctaattgaatttgtaatggctttaatgttgtcgttcttaaatgtttttcaatttctgattcaaaagtacatgtaatttaaaggtcaacgagcaatcgcgctatgtgaatatcaacttaaacaatacttattttaactgagttctacataacgtttttctaaaacaccgcctaaattcaaaccctaattctaacatttggaagttgtattaaatcatggtagtgtgatagtggaaaagttataaagataaggagctgggtctaatgaagcaatttgtaaacttaggtaaatctgatgttgaagtgtttccaatcgcacttgggacgaacgcagtaggtgggcataatttatatccgaacttagatgaagaacaaggaaaagatgttgttcgtcaagccattaatcatggtattaatttattagatacggcatatatttatgggccagaacgatcagaagaattggttggagaagttgttaaagaatatccgcgagagcaaattaaaattgctacaaaagggtctcgtgaatttgatgaaaatcaagaagtacatcagaacaatcaacctgaatatttaaaacaacaagttgagaatagtttgaaacgtctacaaactgattatatcgatttatattatattcattttccggatgacaacactccgaaagatcaagcagttgcagcattacaagagcttaaggaacaagggaagattaaagccattggtgtatcaaatttcacattagatcaacttaaagaagcaaataaagatggttacgttgatgttgtacagttagaatataatttattgcaccgcgaaaatgaggcagtattgcaatattgtgttgatcaccaaatcacatttattccttatttcccattagcatccggtattttagctggaaaatatgatgagaacactaaatttagtgaccatcgtactacacgtcgtgattttatacctggtgtttttgaagagaatgtgcgtcgcgtaaaagctttggaaagcctagctgcagcacatcaaacttcaattgcgaacattgtattagcattttatttaacgagaccagctatcgatgtgattattcctggtgcaaaacgtgcagaacaagtcgttgaaaatattaaagctgcagatatcgttttatcagatgatgagattcaatatatcgatgaactgtttccgattgaagactaaatgaattgtatttaatggtgacatatgtatctaattcatcatgaattagccccgtatcacaaacgacgttatataaggatgacgaaatttcgtcaaatttatataaaagttgtaagcgttttactattcggtaggcaaagcttatgatagtataattaggtaacgaaaaacacagatatttattaatcaaaagtgaggttaggctaaaatgattactgttttgtttggtgggagtagaccaaacggtaatactgcacaattaacaaaattcgctttgcaagatttagagtatcaatggattgacgtgacacaacatcagtttaaaccgatacgtgacgtgagacatacagcagagactattacttcatatgacgatgactatttgccgattctagataaaatattggctagtgatacaattatttttgcatcaccagtgtattggtatagcatttcagcaccattgaaagcatttatcgaacattggtcagaaacattacaagataaacgatatcctaattttaaggcacaaatggccgaaaaggattttagagttattttagttggtggagattgtccaaaaataaaagcgaagccagcaattacgcaaatgaaatatagtttagactttttaggtgccactttaaatggttatattattggaactgctgaaaagcctggtgacatcatgaaagacaactatgccttagcacgtgcaactgagtggaatagtatattgcaataagacatacctcatactaaacgaagtgattttttgcttcgttatttttatttttaattttaacggaaaatataaatatataaattgaatagacaatcattgtttattaagtattgagcaagttgtggtataatgccgttattaaaacttgttaataaggggagaaagtcatgttcaaggtaagacaagcaactgaaaaagatgttgttcaaattagagatgtcgcaactaaagcttggtttaatacatacttaaatatatacgctgcgacaacagttaatcacttgttagaagcttcatataatgaacatcatttaaagaaaagacttcaagaacaattattcttagtcgttgaagaaggtaatgacatcgttggctttgctaactttatttacggtgaagaattatatttatcagctcattatgttaaaccagaatcgcaacatacaggttatggtacagcattgttaaatgaaggattatcacgttttgaagataaatttgaaggtgtttacttagaagtagataataaaaatgaagaagcagtagcttactataaagagcaaggttttacaatcttacgctcttatcagccagaaatgtatggcgaaaagttagacttagcacttatgtacaaagcattttaagtaaattaaatattatattaaacgaaaaggaggggaataatgactaacgcatttgtagatttaaaattagtagaagaaaaagtttttaaagacccgatacatcgatatattcatgttgaagatcaattgatatgggatttaattaaaactaaggaattccaaaggttacgtcgaattagacaactaggaacactgtacctatcttttcacacagcagaacatagtcgctttggacattctttaggtgtgtatgaaatagttagacgattaattgatgagtcatttattggtcatgatgcatgggacaataaagatagaccgttggcattatgtgctgcattattacatgatttaggacatggtccattttcacatagttttgaaaaaatatttaatacagaccatgaagcatacacacaagcgattattactggagatactgaggtgaatgctgtattacgtaaagtggcgcctgagtttccaagagaagttgcggaagtaattaataaaacgcatcataataaattggtcatttcgatgatttcgtcacaaatcgatgcggatagaatggattatttacaacgtgatgcgtatttcacaggtgtatcatatggtgcttttgatatggaacgtattttaagattaatgcgaccttctaaagatgaagtactaattaaagaaagtggtatgcatgcagttgaaaactttattatgagtcgttatcaaatgtattggcaaatttatttccacccagttagtcgtggtggagaagtgctgcttaataattgtttgaaacgcgcaaaacagctttataatgaaggctatgaatttaagttgcatccacatgattttattccattttttgaagagacagttacgattgaacaatatgttgaactcgatgaagcggtagttacgtattatttggaaaaatggacaaaagaagatgatgctattttaagtgatttagcaagtcgatttattaatagagacttatttaaatatattccatttgatggctcaattattacaatatcagaactgcaagaactgtttgaagcaggtggtattaatccagattattattttgtgagtgaagcattttcggatttgccatatgactatgatcgacctgggtcaaatcgcaaaccgattcatttattaagacaagatggtacgattagagaaataagcaatcaatctttagtcattcatagtattacaggtattaatcgccaagactataaattatattatcctagagaaatggttgcaaagattaaagataagacaattagagaagctattgaaaatttgattaatgagcttaattaaacagggctaaaattgttatcgttaaatatggaggttatatcattgtctgagaaaaaaggctttaattttaatatcataaaaaatgaccctctagatggtcataaaggtacaaatattggttcaattagcttagacaatattgcaccagtttttatcgatgttgctaacaaagaagcatttattgatattggaggcatgcatgctcgcgccaaagttgaaaaaggcgtgaaatggattactgataaagctgctgttgaaggcgatgaagctaaagaatattggttgtgttgggtaacaacagaacgtaatgaacaaggaccatattatgctggtttaacagcgtgctatttattagtgaataaagcaattcgtcgtggttataaaagtatgcctgaacatgttaatatgatggataaatcaatgaaacatcatattatcattgatcaaattggtgacgagaataaagctattttaaaagactttttaatgaaccatgatgaaggtatgtggaagctttcttctgatgctttacatcaagcatttaattaaatattagaaactaaaatttcccaattaatctataaagatatgattcatttctcaatgacgacgtaaatcttgaggtgaaaataaagtcttagattggttgggagtttttttaatttttttgaaattaaattaatctgtagttaataaaaaatttgaataactgacacatttttttgatcatagctatatactttgtgaattaattcacattataataagagtgaagataagagtattataaattatctttaaataaatatatgtgaagtaaaaattacacgttagcatatcgattatgtcatttcttttaacatattaactagggaaacgttaaaagttaacggttgatatctaactaaaaacaaagtcacagtagtatgttttaatctggcgtctattacaaataaaaattacatctataattattcgttttcatttttgaaagtaatcgccaattaatatcatacatactggagtgactataaggaggacattattatgagagcagcagttgtaacgaaagatcacaaagtaagtattgaggacaaaaagttaagagctttaaaacctggtgaagcattggtacaaacggaatattgtggtgtttgtcataccgatttacatgttaagaatgctgattttggtgatgttacaggcgttactttaggtcatgaaggtattggtaaagtcatcgaagttgcagaagatgtagaatcattaaaaattggagaccgtgtgtctatcgcttggatgttcgaaagctgtggaagatgtgaatattgtacaacaggtcgtgaaacactttgccgtagtgtgaaaaatgctggttatacagtagatggtgcaatggctgaacaagttattgttactgcagactatgctgtgaaagtacctgaaaaattagatccagcagcagcgtcttctattacatgcgcaggtgtgacaacttataaagctgtaaaagtaagtaatgtaaaacctggtcaatggttaggtgtttttggtataggtggtttaggtaacctagctttacaatatgctaaaaacgttatgggggctaaaattgttgccttcgacattaatgatgataaattagcattcgcgaaagaattaggtgcagatgctattattaattctaaagatgttgatccagttgcagaagttatgaaattaactgataacaaaggattagatgcaacagtggtaacttcagttgctaagacgccatttaaccaagcggttgatgttgtaaaagctggtgcaagagttgttgccgttggtttacctgttgataaaatgaacttagatatcccaagattagtgcttgacggtattgaagtagtaggttcacttgttggtacaagacaagacttacgtgaagcgtttgaatttgctgctgaaaataaagtaacacctaaagttcaattaagaaaattagaagaaatcaatgatatttttgaagaaatggaaaatggtactataactggtagaatggttattaaattttaaaaatatcaactgactatatagataaagaaggtagtgctctgaacactatcattataatcaaacacgaggttttcatgaaagatagtgaaaatctcgtgtttttttggttttgaggtgttgtttgtattttataaaatggcttacatatatgaagcgttgattaagtatggaattgttaattaattgaacctatttagctttaagaaggcataacaagatgaccttattttatgctataatatttctattatgcgaagattaaggtgagtagtaaattggataaaaaagtaagtattcaaacaaagcaagtgttgaaacagcacaacgaaaaagaaaaatttgaatttactactgaaggaacttggcaacaaaggcaatctaactttattcggtatgtagaacaaattgaggatgcaacagttaatgttacaataaaagtggatgatgatagcgttaagttgattcgtaaaggcgacattaatatgaatttgcattttgttgaaggacaaacgacaacaactttttacgatatatcggctggacgaattccactagaagttaaaacattacgcattttacatttcgtaagtggagacggtggcaagctaaagattcattatgaattatatcaagataatgaaaaaatgggttcttatcaatatgaaattaactataaggagataggcgaatgaatattattgatcaagtgaaacaaacattagtagaagaaattgcagcaagtattaacaaagcaggattagcagatgagattcctgatattaaaattgaagttcctaaagatacaaaaaatggagattatgctactaatattgcgatggtactgactaagattgcaaagcgtaatcctcgtgaaattgctcaagcgattgttgataacttagatactgaaaaagcacatgtaaaacaaattgacattgctggtccaggattcattaatttttacttagataatcagtatttaacagcaattattcctgaagcaattgaaaaaggtgatcaatttggacatgtaaatgaatcaaaaggtcaaaatgtattgcttgagtatgtttcagctaaccctacaggagatttacatattggtcatgctagaaatgcagcagttggtgatgctttagctaatattttaactgcagctggctataatgtaacacgtgaatattatattaatgatgctggtaatcaaattactaacttagcgcgttcgattgaaacacgtttctttgaagctttaggtgacaatagttattcaatgccagaagatggctataatggaaaagatattattgaaataggtaaagatttagcagagaaacaccctgaaattaaagattattctgaagaagcacgtttgaaagaatttagaaaattaggcgtagaatacgaaatggctaaattgaaaaatgatttagcagagttcaatacgcattttgataattggtttagtgaaacatctttatatgaaaaaggagaaattcttgaagttttagcaaaaatgaaagaattaggttatacgtatgaagctgatggcgctacatggttacgtacaactgattttaaagatgacaaagacagagtattaattaaaaatgacggtacatatacgtatttcttaccagatattgcgtaccacttcgataaagttaaacgtggtaatgacattttaatcgatttatttggtgctgatcatcatggttatattaatcgtttgaaagcatctcttgaaacgtttggtgtagatagtaatcgtttagaaattcaaatcatgcaaatggttcgtttaatggaaaatggtaaagaagtgaagatgagtaaacgtactggtaatgcgattacattaagagaaattatggacgaagttggcgttgacgctgcacgttatttcttaactatgcgtagtcctgatagtcactttgattttgatatggaattagcgaaagagcaatctcaagacaatccagtttactatgctcaatatgcacatgcgcgtatttgttcaattttaaaacaagcgaaagagcaaggaattgaggtagctgctgcgaatgattttacaacgattacaaatgaaaaagcgattgaattgttgaaaaaagtagctgatttcgaacctacaattgaaagtgctgctgagcatagatcagcacatagaattactaactatattcaagacttggctgctcatttccataaattctataatgctgaaaaagtgttaacagatgatattgaaaaaacaaaagcacatgttgctatgattgaagcggtcagaattacattgaaaaatgcattggcaatggtcggtgtaagcgcacctgaatcaatgtaagaacatttatatacactccaacgtagagtttctcgaaagatactttgtgttggagtgttttttttaggtatgtgacatattggggaatgcttagtatgtgaataaggttaagaggaacacagttggatgctactgcacaactgcataagagagcctgagacataaatcaatgttctatgctctacaaagttataatggcagtagttgactgaacgaaaattcgcttgtaacaagcttttttcaattctagtcaaccttgccggggtgggacgacgaaataaattttacgataatatcatttctgtcccactccctctaaaatggagggtgtaaatgttaggaactgatgaattatataaagttttatatgaacatctcggaccacaattttggtggcctgctgataatgacattgaaatgatgttaggtgcaattttagttcaaaatactagatggcgaaatgcagaaattgcattgaatcagattaaagaacatacgcattttaatccaaatcatatattagaactacctattgaaacgttacaatcattgatacattcaagtggcttttataaaagtaaatcactgacgattaaaacattattaacatggttagcacgacatcatttcaattatcaagagattaatgagcgatataaaggtggattaagaaaagaattattatctttgaaaggtattggaagtgaaacagcagatgtcttacttgtttatatattcggacgtattgaatttattccagatagctatacaagaaaaatatatgataaattaggatatgaaaacactaaaaattatgatcaattaaaaaaagtagtcacattaccaaatcattttacaaatcaagatgctaatgaatttcatgctctgttagatgtatttggtaaacattactttagagacaaagatataaagaattatgattttttagaaccttactttaaaaagtaaacgctgtgaagttagatagatgagtttatatgaaatataaaaaataatttactattttcttttagtatgtggacttatataataaatagaagcatataaagaaaaaaacagttgtttgtttgtgcagcaactgcataagagcccctaatcgctaaagctcaaggggagtaaaggaatacagttgtttgtgcagcaactgcataaaagcctctaatcactaaaggtgaagaggaacgcagttggatgctaaggcacaactgcataaaagcctctaatcgctaaagctcaagaggctttaaaaaggagatgtgatagtgtgaagaaatcgttaattgcttttattttgatttttatgcttgtcctgagtggctgtggtatgaaagataatgataaacaaggtagcaatgataatggctcgtctaaatcgccgtaccatagaattgtttcgttaatgcctagtaatactgaaattttatatgaattaggattaggtaaatacatagttggtgtttcaacggttgatgattatccaaaagatgtgaaaaagggtaagaaacaatttgatgctttgaatctaaataaagaggaacttttaaaggcaaagccagatctaattcttgcgcatgagtcgcaaaaggcaactgctaataaagtattgtcatcattagagaaacaaggcatcaaagtagtgtatgttaaagatgcacaatcaattgatgaaacttacaacacatttaagcaaattgggaaattaacgcatcatgataagcaggctgaacaacttgttgaggaaactaaagataatatcgataaagtcatagattcaattcctgctcatcataaaaaatcaaaagtatttattgaggtttcatcaaagcctgaaatatatacagcagggaagcatacattttttaatgatatgttagaaaaattagaagcccaaaatgtgtatagtgacattaatggttggaaccctgtaacgaaggaaagtattattaaaaagaacccagatatattaatttcgacggaagctaagacaagatcagattatatggatatcatcaaaaaaagaggtggattcaataaaattaatgctgtcaagaatacacgtattgaagttgtaaatggtgatgaagtatcaagaccaggtccacgtattgatgaaggattaaaagaattaagagatgcaatttatagaaaataaaccattctaattatgccccttattgctacatgtaaaaaatacatgtttgagataaggggtttttaaaatatatttagtgaatgatagcaacgcgagtatgtgattgctataatgaatgtaattatcgatgaaagaaaagagaatgctatgacatttaataaagtattattgagctggatagtcatattgattataacaactagcatatatctattttggcagttgggcgatatcaatgatgtatttaaccagtctattttaatcaatgttagattaccgagattattagaagcattgttgacaggtatgatattaactgttgcaggccttatatttcaaacagttttaaataatgcattggcagatagctttacattaggattggcaagcggcgctacatttggttcaggattagcattatttttaggtttaacaacgttatggattcctgtattttcaataacatttagtttgataacattaataactgtattagtcattacgtcggtattgagccaaggctatccagttagaatcttaatattaagtggtttaatgattggtgcgttattcaattcacttctatattttttgattttattaaaacctcgcaaattaaatacaattgccaattatctgtttggtggttttggtgatgcagaatactcaaatgtatctataatagcaatcacatttatcattgcattgtttggtatatttatcattcttaatcaactaaagttattgcaattaggagaactaaaaagtcagtcactaggcttaaatgttcaattgattacatatatcgcgttatgtatagcttctatgataacggcgataaatgtcgcatatgttggcatcattggattcattggtatggtgataccgcaactcattagaaaatggcagtggaaacaatcattaggaagacaattggctttaaatattgtaactggaggacaaataatggttatggcagattttattggtagccatatattgtcaccagtacaaataccggcaagtattatcattgcattaattggtataccagtgttattttacatgctaatatctcagtcgaaacggttacactagcacacgacatttgctaaaataaaaataactataaacataaagagggcataagcgatggatttgaatcaaattaaagcagttgtatttgatttagaaggtacgttgttggacagagttaaatctcgagagaaatttatcgaagagcaatatgaacgatttcatgactacttaattcatgttcaactggcagattttaaaaaagcatttattgagctagatgacgatgaagataatgataaacctgatttatataaagaaatcattaaacgtttccatgtagataggttaacttggaaagacttatttaatgattttgaaatgcatttttatcgttatgtatttccttattacgatactttgtatacactagaaaagctatcgcaaaaaggctttcaaattggtgttatcgcaaatggtaaatctaagattaaacaatttcgattacattcacttggtttgatgcatgttattaattatttatcaacatcagaaacagttggttttcgtaaaccacatcctaaaatttttgaagatatgattgatcaactaggggtattacctgagcaaattatgtatgttggcgatgatgcgttaaatgatgtagctccagcacgagctatgggcatggttagtgtatggtataaacaagaagatgctgaaattgaaccactcgaagaagaagttgattttacaattacaacagtggaagaattattaaccattttaccaataaaaaatgataataaaggagaaaattatggatctatttactagaaaagatggaacatcgatacattacagtacattaggtgaaggctatcctatcgtattgattcatactgtacttgataattattctgtgtttaataaattagcagcagaattagcaaaatcatttcaagttgtgttaattgatttacgtggacatggctattctgataaacctcgtcacattgaaataaaagatttttctgatgacattgttgaattacttaaatatttatatattgaagaagttgcatttgtatgccatgaaatgggtggaatcattggtgcggatatttcagtacgttatcctgaatttacatcatcacttacgttggtaaatccaacatctattgaaggtgaattaccggaagaacgtttatttagaaaatatgcccatattattcgaaactgggatcctgaaaaacaagataaatttttaaataagcgtaagtattatcgtccgagaaaaatgaatcgattcctcaaacatgtcgtagatacaaatgaaatatcaactaaagaagaaattcaagcagttaaagaggtattcaaaaacgctgatatttctcaaacttatagaaatgtcgtagtaccgacaaaaattattgcaggagaattcggtgaaagaacaacaagattagaagctaaagaagtagctgatttaatccaaaatgcggactttgaagtatatcaagaatcaagtgcattcccatttgttgaagagcaagaaagattcgtcgaagatacagctgcatttatcaacaaacatcacgatgaaaagcatgtttaatttttagtgataagtgaaatataaaagtagtaattattatttgtaatataattgtaatatgactgttgttttagaaatgattgttgtataatggttgtgagcacaagacgatataaataaaaggagagagtgcttatgaaaaagctactaacggcaagtataattgcatgttctgttgtaatgggagtaggcttagtgaacactagtgccgaagcagcaagtggcaactctattgatactgttaaacaattaattaagggtgatcagtcattagaaaatgtgaaaattggcgaatctattaaagatgttttaactaagtacaaaaatccgatgtattcttacaatgaagatggaactgaacattattacgaattccatactaaaaaaggtatgttattagtaactactgatggtaagaaaaacaatggtaaagtaactcatatttcaatgatgtataatgatgctaatggtccaacatatcaagctgttaaaaattatgttggcaaagcagtaacacatacggaatatagcaaagttgctggtaattttggatatattgaaaaaggcaaaacgacttatcaatttgcctcagcaccaaaagataaaaacataaaattatatcgtattgatttggaaaaataataattaaattaatcgtgcttaaccgacaagttaaatcgcaatacttgtcggttattttattacatggcataatacagtgaatattaatttttatgatttgcgaaggggaaattaaaccaatacaataaataaagatgtttcattttaaaggagtactaccaatgcgtattaacgataaaattttactagaaaatatagaagattactttaatcataaaggtttatcaccgcatttgattgatgatattaaagagaaagtaattactgatataaaaaattctgaaaagaaagatcaagattatattgaatataaaagaaaatctccagcacaaatcatattaatgattcaaaggaatttgtttgctttacaaatgaatccagttattttctttattataaacttcattctcatatcctatttatatgataaacagtatgttcagtttcaagctattactggaatgagtctattttactgtttagtgatttttccaatgactattgttgtatacctaagggtgtctcaaaagaattacttgcgtagtaataaaatagaaatgattatgggtacaattatcgctatcatatccttgttattaattatattacaagcatttaatattacttggggcgttataccaattacaaattttggacatcaatttttctttttcattggtattattttagtaattgccggcatattttataagcgacttgagttttcgggaatcgggttattattttgtcaaaaaaccgtcgatgcaatgattcataatccacaatcagcccagattttttcattaattatatggatattattagtagttctagttatatatttcacaattagattatcttcacgtacaagattataaatatgataaaactattcacttgattaattgtattaattgagatgaatagtttttttattgttggaataacttttggtaatttataaataatttaaaaaaattgtttataaaatggaagcgtatatagaatgaaggttgggtatatagtttattgagggaggtgtcacaatgaataaagtcacaattaatcctcaaatccaattaacttatcaaattgaaggtaaaggggatcctataatattacttcatggattggatggtaatttagctggatttgaagatttgcaacatcaactagcatcatcatataaagtacttacttacgatttaagaggtcatggcaagtcttctaaaagtgaatcatacgatttaaacgatcacgttgaggatttaaaaattctaatggagaagttaaatattcatgaggcacatattctaggacatgatttaggtggggtagttgctaagttatttacagataaatatgcttatcgtgtaaaatcattaactaccattgcatcgaagaaagatgacttaatacacagctttactcaattgttaattcaatatcaagatgatatagcgggttttaataagtctgaagcgtatattcttttattttctaaattgtttagaaatcaagagaagacgatgaaatggtatcaaaaacaaagaatatatagcattaagtctgaggatgatagtgcggtggcaattcgttcattaattttgcataaagatgaacctatgtatttaaaaaaacgtacatgtgtgcctactttgttaattaatggggaacatgatcctttgattaaagataaaaatcattttaaattggaagcgcattttttaaatgttacgaaaaaaattttcgaacattcaggacatgcaccgcatattgaagaaccagaagcatttatgaattattatttaaattttttgaaaagcgtatcataatatgtgatatataaacctagggcataaagtccttaggcaatgtgaaaaagctgattactattcattatttgatagaaatcagcttttttgaaatgtatttgatatatactacttgttatgcggctatcttccctatattaagtgccattagtgcaaaacctcttaacatttacaaaaaaagacataaaaaaaggaagtttaatagaatgtatcatctatcaaacttcaccaaattgcgctaaacaaaattatagttcaatttcgttgtttgcttcagtgattcgtttatttactcgactcaataatgattcgatttttttacgttgttgtgcattaacaagaattaatacagttctttcatcatgctcattacgttttttatcgaagtaatcttcttgagataaaattttaactgctttaacaacttgtggttgtttgtagtttaaatgattaataatatctttaagatagtattctttctctttgttttcgctgatgtatgtcaatacagcgaattcttcaaagctaattgaaaattcctttttaattaaactttttaatttgtcagcataagtgaccattgataacaactcaaagcaatcattgatttttgtaattgccatgtttaaaacctccctatttgatgcatcttgctcgatacatttgcccgataatatattgatatctaatctttatttattatagatatgttagtcataattttgcattaaataagttttattaaatatatttaatgctctattatttagttaattataactaattaaaaatgagaagtaaacaaaaaagtgtttataaaacaaattattcattagacacagtgattgtatttctgggttagcatttggtttagtcaaaaatatcagcattttttataatttaccttaatttaatcgccaatacaaggtaatttatttaatgaaacgatttagcgcaattaaatgtttcgatattcaatgtatgtctaaagagattctttgttatagcttaactcttccaagttaacttcttctactatttatacccatttttcagaattttatcactaaaaatgaaaaatttttataatttttttaatttagtaattctcagtgcagttttaatgataagaaaaacacattaatttagtgattaaaaccaatctatagcacgttaaagtgtctatacgttattccgattgataacgggtaacaaataatagaaagtacgataattgatcatgcattaaagcacttttatttttcaaactcgactcaatgaattataaaaagttgtgcattttgacttatttttaattaattgaataaccaactatgaaatattagcacgaataacataatttttgctattaatttggtgtaaattattaaaaaataacattaatttaggtcttaagaatgagttgactatcgaatttgctaaattaaaatttgttgtgtcaaagcatactacccaaatcaacgcttttctaaagatttttagaccacaaaaaaatagcttatcacttttaaaaataattacaagttaaaatgataagctaaaagttaatttaaaataatcttaaaagtataatgcctgtcaaaatacataatagaccaatagtttttctggatgtcattgctattttaggtgaaccaaataatccaaagtgatctatcaatatgcccattagaatctggccaaacatcccaataagtgttgttaatgctgcacccatatgaggcattaagataatgttagctgttacaaaagccatgccaagtataccgccagtaaaatagataggctttaatttaccgaattttaaatgacttgttttcagttttaaagaacgattaaaaatagcggttaaaatcaatagcgctattgacccaattgtaaatgatactaatgatgcaaaggctggtgaatgagtatgacttgctaaagcactattaattgtcgtttgaataggtggaaagaaaccaaaaataaatcctaagagaagccaaaacagtaaatacttttgatcagttagtaataaattattcttgttaaattgattcattatgacgatgccgataatgagtaacaatactccaattgctttaattaaattaaaatcatgaattgtagcgccaaataagccaaatgtatcaataatgacacccataataatttgacccgcaactgttgcaattacagttaatgttgcacctaattttggcaataacaataaattgccagttaaaaagctaaccccaagcaaaccaccgactacccatgtgtagttaaatgattgattattgtaaaagtgaatagtaaatacttctggattgataatgatatttaaaataattaaacaaattgttccaactgaaaatgaaatgaatgaagtatagaaaggcgatttagtatacagtgatagtcttgaattgacagatgtttggataggaataagcattccaactaggacaccaatgatatagaaaagaagcatatgaataaagtctcactttccaaagttaataataaaatcatatgaatacattatcattatagagaaaatatacaactcatttacaataatgttgaaaaaaacaggacattatcacaacaaaatcaccctagacaatcatgatgaaagtctagggtgttagtatttatactaaattaattgcgctttctttatatctatttcttatcttcaaataaaacagttgttgttttatcaataatttgagcagaatgtactttggtgatagtaccactatttgactttataatatttaaatctactaatgcattcatactatcacgtgcaacttgctcggtcactacgttgtttaattgtggtaattgcagttttacaggcttgtctagtgaagatttaaaacttaattcaagtgttttagtcatgaatatgtcctcctgattaaattgataaagatttgatgagttcgatattgctatatgtttctccagtaagtcgctcaataagtttgctgaatgttttaatttggtcgtttgatgcatcagggttaatgttagcgaatcgacgcttaaattctgtttgtttgccgttagcgtctactttagtaaatgataatacaatagtgatgtggtttattttactcatattttaaaacctcctttcacactatatatcgaaataaaataataaaatggctaattttattttctatgtttaaaatctataaaaaaggcaatagatatatgtaactaaaatataaaatagctatgattaagacacttaaagcaaggggaggttgagtaatgaataaagtagaagcgattaaatttaatgatgatattgttaaaatgtatgaagcgctcaagataaaatctgaacgtgactatttattctttaagttagctatacatagtggattgaaagtatcagaattattaacaattacagtctctcaagttaagagactaattgaaaagtgtacgttatcagaaatgtgtaaagcacattttcattcgttgattaaaattaggttaccagaaacattatcgaaagaactacttcaatatatagaggacaggagtctttcgaatgaagacgttctttttcaatcactacgaacaaatcaagtattatctagacagcaagcatatcgaataattcaccaagcatcaattgaagctggtatagataatgtaggactaacgacattgcgtaagacatttgcatatcatgcttatcaaaaaggtatacctataccagtcattcaaaagtatttagggcatcaatctgctattgaaacactaaattttatcggtttagaaaatgagtgtgaacatagtatttatatttcattacaattatagaaacaaaggaggctaataatgagtttggtttatttattaattgctatacttgtgattatggcgatgatacttctaatgtctaaacgtagagcattggctaaatatgccgggtacatagcgttggttgcacctgtaatttcatctatctattttttgattcaaataccatcagtagctaaactgcaatatctttctacctctattccatggattaagacattagatattaatttagatttacgtttagatggtttaagtttaatgttttctcttattatttcacttattggagttgcagtattcttctatgcaactcaatatttatcctctcgaaaagacaatttaccaaggttttatttttatttaacgttatttatgttcagtatgattggtattgtattatcagacaatacgatattgatgtacattttttgggaattaacgagtgtatcatcatttttattgatttcatattggtataacaacggagatagtcaatttggtgcgatgcaatcatttatgattacagtatttggtggtttggcgttattagttggttttatcatgttgtatattatgacaggaacgaataacatcacagagatattaggacaagcagatcatattaagaatcatggattgtttatccctatgatttttatgtttttattaggtgcatttacaaaatcagcacaatttccatttcatatttggctacctagagcaatggctgcacctacacctgtaagtgcttatttacattcagccacgatggtaaaagctggtatctttttattacttcgatttacaccattattaggtcttagcaatatgtacgtatatatcgttacgtttgttggtttaataacaatgttatttggttcaattacagctttaaaacaatgggatttaaaaggtatcctagcgtactctacaatcagtcaacttgggatgattatggctatggtgggtataggtggcggatatgctcaacaccaacaagacgcaatagcatctatttatgtatttgtattatttggtgcgctatttcatctaatgaatcatgccatctttaaatgtgcgcttttcatgggagtaggtattttagatcatgaagcaggttcaagggatatacgaattttaagtggaatgcgtcaactatttcctaaaatgaatctagtcatgacgatagcggctctatctatggctggagtaccatttttaaatggatttttaagtaaagaaatgtttttagatgcattaacacaaactggacaattatcccaatttagtttgatttcaatgatagctatcgtgtttgttggtgttattgcgagtgtttttacattcacatatgcactatacatggtaaaagaagtattttggacaaaatatgattctaaggtttttactaaaaaaaatatccacgaaccatggttgtttagtttaccatctcttatattaatggtgctagtacctgtaatcttttttgtaccaaatatatttgggaaggggattatcgttctagcattaagagctgtatcaggtggtaatcatcaaattgatcaattggcaccacatgtttcgcaatggcatggatttaacataccgcttcttttaaccatcatcattattttattgggtagtgtactagcaatcaaagtagattggaaaaaagtgttcacaggtaaaattagacagatttcagtttcaaaaagctatgagatggtatatcgacattttgaaaagtttgctacgaagcgatttaaacgtgttatgcaagatcgtttaaaccaatacattattatgaccttaggcatatttatgattatcattggatatggttatattcgaattggacttcctaaagtacatcagttacatgtttctgaatttggggcattagaaattatattagcaatcgtaactgtcacaattggtatttctttaatttttatacgtcaacgactgacaatggtcattttaaatggagtcatcggatttgttgtgaccttattctttatagcaatgaaagcccctgatttagcattgactcagctagtagttgaaacaataacgacgatactatttattgtcagtttttcaagattaccaaacgtgccaagatctaacgctaacaaaaaaagagaaataattaaaatttctgtatcactcttgatggcacttattgttgtatcattaatttttattacacaacaaacagatggtttatcatcaatatcagacttttatttaaaagctgacaaactaacaggtggtaaaaatattgtaaatgcgatacttggtgactttagagcattagatacattatttgaaggattagtgttaattattactgggctaggtatttacacattattaaattatcaagatcggaggggacaagatgaaagagaatgatgtcgtgttaagaacggtcacgaaacttgttgtatttattttattgactttcggattctatgtcttcttcgcaggtcataataatcctggtggtgggtttattggtggtttaatatttagttcagcgtttattttaatgtttctggcttttaatgttgaagaggttttagaaagtttaccgattgattttagaattttaatgattattggagcattggtatcatctattactgcgataatacctatgttttttggaaaaccatttttgtctcaatatgaaacaacttggatacttccaattttaggacaaattcatgtaagtacaataacactttttgaattaggtattttattctcagttgttggtgttattgtcacagtgatgttgtcgcttagcggaggtcgatcatgaatttaatattattactagttataggatttttagtgtttataggaacatatatgattttatcaatcaatttaattcgtattgtaatcggaatttcaatatatactcatgctggtaatctcattattatgagtatgggaacgtatggttctagtagatcagaaccactaataactggtggaaaccaattgtttgttgatcccttgttacaagctattgtactaactgcaatagttatagggtttgggatgactgcgtttttacttgtacttgtttatagaacttataaagtaacaaaagaagatgaaattgaaggcctaaggggggaagatgatgctaagtaacttattgattttaccaatgttattaccattcctttgtgccttaatccttgtatttttaaaaaataatgatcgtatttctaaatatttatacttaggtacaatgactatcaccacaattatttcattaatgctattaatttatgttcagcgtcaccgtccaattacgctagactttggaggatggtcagcgccctttggtatacagtttttaggagattctttaagtttaattatggttacaaccgcttcgtttgtgattactttaattatggcatacggatttgggcgtggcgaacataaagcaaatcgttatcacttgccatcgttcatattatttttaagtgttggcgtgataggctcttttctaacatcagatttatttaatttatacgtcatgtttgaaattatgttactagcgtcatttgtactcattacacttggacaatctgtagaacaattacgtgctgcaattatttatgttgtcttgaatattattggttcatggctattcttattaggtataggtttactttataaaacagtaggtacattaaacttttcacatattgcaatgcgtttgaatgacatgggagataatcgcactgttacaatgatttcattaatcttcttagtcgcatttagtgcgaaagcagcgctggtcctttttatgtggctacccaaagcctacgctgtgttaaatactgagcttgcagcattatttgcagcgttaatgaccaaagtaggggcctatgcattaattcgattcttcactttactatttgatcaacataatgatctcatacatccattgctagcaactatggctgctataactatggtcatcggcgctataggtgtcattgcttataaagatattaaaaagattgcagcttaccaagtcataatctcaataggatttatcattttaggtttaggaacaaacacgtttgcaggtattaatggtgcaatattttatttggtaaatgacattgttgtaaaaacattgctattttttattattggtagtttagtttacattacaggctatcgacaatatcaatatttgaatggcttagctaaaaaagaacctttatttggagttgcgtttattataatgatttttgctattggcggcgtgcctccatttagtggctttccggggaaagtacttattttccaaggtgcattgcaaaatggcaattatattggactagcgttaatgattattactagtctaattgcaatgtacagtttatttaggatacttttttatatgtattttggagataaagatggggaggaagttaattttaagaaaatcccgctatatcgaaaaagaattttaagtattttagtagttgtggttatcgcaatcggaattgctgcacctgttgtgttaaatgttacaagtgatgcaactgagttgaacacgagtgatcaattatatcaaaaacttgtaaatccgcatttgaaaggagaggactaaatgaatcaaatagttttaaatattatcattgcattcttatgggtattatttcaagatgaagatcattttaaattctcgactttcttttctggatatctaattggtttaattgtcatttatatattacacaggtttttcagcgatgatttttatgttagaaaaatatgggtagctattaaatttttaggtgtttatttatatcaattaataacatctagcattagcacgattaattatattctttttaaaacaaaagatatgaaccctggattactttcatatgaaacaagactaacaagtgattggtcaataacatttttaacaattttaattattataactccagggtctacagtaatacgaatttctcaagactctaaaaagttttttattcatagtatcgacgtgtcagaaaaagaaaaagatagtttgttaagaagtattaagcattatgaagacttaatattggaggtgtcgcgatgatacaaacaataacacatattatgattattagttcactcattatttttggaattgcattaatcatctgtttatttagattaatcaagggacctacaacagcagatcgtgtcgttacatttgatacaacaagtgctgtcgtaatgtcaattgtgggtgtgttaagtgtacttatgggcaccgtttctttcttagattcaatcatgctcattgccattatatcttttgtaagttctgtttcaatatcacgctttattggtggggggcatgtgtttaatggaaataacaaaagaaatctttagtcttattgctgctgtgatgttgttgttaggtagttttattgctcttattagtgcaataggtatcgtgaaattccaagatgttttcttaagaagtcacgctgcgacaaaaagttcaactttatccgtgttattaactttaatcggtgtattaatttattttattgtgaatacaggatttttcagtgtgcgtttattactgtcacttgtttttattaatttaacttcaccagtcggcatgcacttagtcgctcgcgctgcttatcgcaacggcgcttatatgtatcgaaaaaatgatgctcacacacatgcatcaatattattaagttcaaatgaacaaaactctacagaagcattacaattacgtgctgaaaaacgagaagagcatcgtaagaaatggtatcaaaacgattgaagtgttggctaaattgttaagcataacaatgcttttgaaaatctgttttcaaaattaatcattaaaagagtactttgaaattggttagtcgattttaaggtgctcattttttgtattataagttaatgttgttatgtgaaagcaagttgtttatttatacaaacaattagtgataaaataaaattaaataattgcaaatttaagtactgcaatcgtagacatatatctatattaaagtgcttttgtggtcgctaactcaatttatcctctaaagtataattacaacgagatgtgatacttaattttcaattaaacaatactttttagagaggtgaaagtttggaaatatttgaaacaattcttatatttatagctgttgtgatactaagttcgtttgtccatactttcatacctaaagtacccctagcatttatacaaattttcttgggcatgttactatttattaccccaatccctgttcaatttaattttgattctgaattgtttatggtaacaatgattgcgcctttgttatttgtagaaggtgttaatgtttctagagtccatttaaggaaatatattaagccagtgatgatgatggcattaggattagtcattactactgtgataggtgtaggtttatttattcattggatttggccagatttacctattggagcagcatttgcaattgctgccattctttgtcctactgatgcagtagcagtgcaagcaatcactaaaggaaaggtcttgccaaaaggagcaatgacaattcttgaaggtgagtcattattgaatgatgctgctggtattatttcatttaaaatagctgttggagtattagttacaggtgctttttcacttgttgatgctgttcagttgtttttaattgcatcaattggtggcgcagtggttggtttacttataggtatggcattagtaaggttccgattaacattgatgcgtcgaggatatgaaaacattaatatgtttacaattattcaattgttaacaccatttgttacgtatttaattgctgaattgtttcacgcatcaggaatcattgcagcagtagttgcaggacttgtacatggtttcgaacgtgacagaattatgcaagtacgtacacaactgcaaatgagttacaatcatacatggaatatactaggttatgttttaaatggctttgttttttcaatattaggatttttagtacctgaagttattattaaaattatcaaaacagaaccgcacaatttaatctttttaataggcatcactattgttgttgctttagctgtctatctatttagatttgtttgggtttatgtcttatatccttatttttatttagccatcagtccattccaaaaaatgatgactaaaaatgatgatgataatccaacgactgagaaaccaccaaagcgaagtttatacgctttaattatgacgttatgtggtgtgcatggaacaatttctttagcaatcgcattaacgttaccgtattttttagcagggcatcatgcttttacgtatagaaacgacttattatttattgcatctggtatggttattattagtttggtagttgcgcaagtattattgccattattaacgaaacctgcacctaaaacagtaattggcaatatgtcgtttaaagttgctagaatttatatattagaacaagttattgattatctaaatcaaaaatctactttcgaaacaagttttaaatatggtaacgtgattaaagaatatcatgataaattagcatttttaaaaactgtagagaaagatgatgaaaactctaaagaattagaacgtctacaaaaaattgcttttaatgtagaaacaaaaacattagagtctttagtagatgaaggacaaataacgaatagtgtacttgaaaactatatgcgttatgctgaaagaacacaggtatatagacaagcatcattaataagaagaatgattgtattattacgaggtgctttattaaaacgaagagtacaaacgagagtgaactccgcatcttcacttagtgttacggataacttaatggaattaaataaaattaataaattagtccattataatgtggttagtcgtttgtctaaggaaacaacaaaagataatacacttgaagttggaatggtttgtgacggttatttaatgcgaattgaaaacttaacaccatcaaatttcttcaactcagcaagtgaagatacgattactaaaattaaattaaatgcattgagagaacaacgtcgcattttacgtgaattgatagatacagacgaagtatctgaaggtactgctttgaaattaagagaggcaatcaattacgatgaaatggttattgtagatagtatgacgtagttcctaattatgctaaaagggattgatgaaaaactgaagggcttttcatcaatcccttttattttatgggaattgaatagatagttttaaactatacgaattattaatatttgagatttaattgaaataagttttaaaaattggaggagatagattaagcgaagtcatttaaaggtgaagttaagtgtattcacaaaaaatagccacactcatatgacatcggatgagtgtggcttaaggatctatggggggaggaaaccatagatgtttactttgataggccagattaaatatcaaagtatgcgattatttatagcttgatgcaaaagtggtatgcctattaaaagttactgcacatagcttttaatattccgttcaaaggaaaggggcatacaattgaacaatctgtaatagtacttttaaccagctatgctaaaagtctagtagggagaacagttgtccaatcacataagaacctctaacttcgttagtacgattaagaaaagctttttagttagtatgtaatacaatttattgacgcgcgtgaatctcttttataagagtgtgtagggaatggcgttgtataaattgtattagaagaacttctaacgcatctctgtggttaaaagagatgaagggaacgacagtttaattaaaactgcataagaacttctagcttttctctttcgttcaaagagaagcagctgttcgcagtttaatcaaaaccacataaagcttttaactttactctttgatttaaagagtgacaaatgtttacagtttaattaaaactgcataagaacttctaacttttctctttcgttcaaagagaagcagctgttcgcagtttaatcaaaaccacataaagcttttaactttactctttgatttaaagagtgacaaatgtttacagtttaattaaaactgcataagaacttctagcttttctctttcgttcaaagagaagttctaataccaccatatcgtgcgatcgggaacggtatatatattaataggagggtaatatatatttaacgcacgatatgggactattagccttcgactttgttatgttgatgtgtggcctaaaatattggagataccaatattttaggttgcatcaacatcaattcatcttacttcattaaaacacagcgtgttatttcatgcttccgtgtacagtttcaatatttgatttcatcattttgtagtaagagtcacctttagtgccttctttaccgattgaatctgtgtacacttcaccaaagatatctttcttcgtttcttcagataaactttccattgctttcttatcaacacttgtttctactaataagtgttttaatttgtgctttttaacaaactcaatagcttgtctcatttgttcaggtgtaccttgtttttcagtgttaatttcccaaatataacctggtgtaataccgtattgttttgagaagtacttgaaggcaccttcacttgtaatcatggcacgttgttcttttggaatgtcattaaatttgtctttactgtcattatttaatttttccaattgagcaatgtatttgttaccttgcttttcataatctgctttatgttttttgtcgttatcgataaatgtttgttgaattgtttttacgtatttaataccgttatctaaacttaaccatgcgtgtggatcttgtttatctttgttgccttcttcaccgtttaaatagataggtttaacatcttttgatactgcgataacttttttatcttttaatgatttaccagcctgttctaaggctttttcaaaccaaccgttaccagtctctaaatttaatccgttgtataaaataacgtcagcgtcagttaactttttaatatctttaggtttaacttcatattcatgaggatcttgaccaacaggtacaatactatgaatatcgacgttgtccccaccaacatttttagccatatcatataaaattgaattcgtcgttactacttttaatttgccatttgacttatcactgctttgtttaccaccagtaccacatgcagcaactagaagtaataaggctaataataaaggtactaattttttcatgttaaacttcctcgtttctttctattcgtaaattttgtgaaaaataatgtgatgatataaattacaaacgtacaaagtacgattgtcgcaccactaggaatgttgtaaatatagctgtaataaagtccgacaattgaacttatgacacttattaaacttgctataatcatcattgagtatagttttttactaattaaaaatgctgtagatgcaggtgtaattaataatgcaactacaagaataatacctaccgtttgaatacttgctactgttactaatgagagtaacaacatcacaaagtaatgtaataacgtcgtatttagaccactcattctactaaacgttggatcgaatgtagaaatcattaatggacgatagaaaataatgattagaataaggacgattgaaccaatcacaatagttgttaaaaatgcactatttgtgattgccagtaaattaccaaacagaatatggtacaaatctgtcgtagtgtttattaagctaataataataatccccgaagctaagaaagcggtaaaactaattccaatagcggcgtcaggtttcgttttactactagatgtgatataaccgataaaaatacttgcgatcataccagttataagtgcgcctacaaacattggaataccaaataagaatgatagggcaacaccaggtaatactgcgtgactcattgcatctcccattaatgaaagaccacgtaatacaattaaactaccaactgtaccacaaactatccctacaataattgaagttatcaatgctcgattcaagaattgatatgtaaataaatgttcgacaaactctaacatgttatattgctcctttgactagggtcactacagtcagtgctactcataaatgtttcgtttaagcgagtgacactcatagcctcttcactatcaccaaagtatcgtaatgtttgatttaatagaataatgcgatcaaagtattgctttacttttgatagatcatggtggatgataagaataagttttccttgttgttttaagttctcgatttttgtcatgattaatttttcgctactaaaatcaattccgacaaacggctcatctagaaaataaacttcactttcggacatcaatgctcttgctactagcacacgttgtaattgtccaccacttaattctgaaatttgtcgatgacgtaaagattctaattctaaatcgcttaataactgtttgagtttatcccttgctgatttattaggtcgtctaaaccatccaatttctttgtagcaacctgataaaatcacttgttccacacttataggaaaatctaaatcaatatgtgctttttgtggaatatatgtaatatgttgcagttgttgttgtataggtttgttatataacaatttagtaccggtagcattaaattcaccaattaaagacttgataagggaagatttaccagcaccattcgggcccatgataccaattatttcgccgcgtactggtatcgataaggaaatgtttttaagtacatgcttattacctaaaaacagatttaaatcttttgtttctaacaaacgtttatacctcctaattaaaagtttaggctaacctaattaactgtataataaactgagaatatttatcatgtcaagtaaattcgtgatataatatagacaatgtatgtgaggtgaaagtatgttaactgaagaaaaagaggactatttaaaggcaatccttacgaataatggcgataaaaactttgtgacaaataaaatcttatctcaatttttaaatattaagcctccatctgtaagtgaaatggtaggacgtcttgaaaaagcaggctatgttgaaacaaaaccatacaaaggtgttagattaacagaggatggtttaacgcatacgcttgatatcattaagagacatcgactattagaattatttttaatagaaatattgaaatataattgggaagaagtacatcaagaagcagaaattttagaacatcgaatttcagatttatttgttgaaaggctggatagcttgttaaatttcccagaaacttgcccgcacggcggtgtgattcctagaaataatgaatataaagagaaatatataacaacgatattgaattatgaacctggcgatatcgttacaatcaaacgtgtgagagataagaccgatttgctaatatatttgtctagtaaagatatttctattggtaatgaagtggaaattgtatcgaaagatgaaatgaataaagtaattatcattaaacgtaatgataatgtaattattgtcagttacgaaaatgcaatgaacatgtttgctgaaaaataaaataaagaagccataaagatatccatgattgaactgataaagacatatggataattgctttaggcttcttttttattagttaatttatcaagtgagtatatttgagtaaaatattcactgcataaagattgaagataatccagattgtactataaatgaagataggtacatgactgagttctttaagtgcactaccatcccactgtggactcggacgctggaaagtcaatttagcaatcgtccaactagattgtagaacttcgcctaataatacacctaaaatatattgataactcattgtgacaagtagttgaatttctactatattttcatcttttaatataaaatacaacatgatagaaattaaagttataacaacaatgggtgagccttttctagatgttaaaattaaaaaataaataaatatcaataaataggtaaatataaagaaactaggtatctgataatggctcgacgctaaacctatcaataacataataggaggcataaaataaccaccaatcgttgtaagccattggcctgctagatgtctagattgtgtaattgcgaatccttgttgtaatgtctgttgtcgctctcgtggacttgttacaatgactaaatcttttgcacggccaccagcgagtttattaaacagtacatgaccaaattcatgtgttaaaacagggatatagtttaaaatgacatctaaatagttcaaaacaggcttatgtctatattgatgaatagcaatataacaagctgcaacaataacgataatgtatatattaagttgaattgtcgtattaaaaaagtttgataaataattcattgttaacctcatataagatattaatttaaagtttgcttagcacttattataaatgatattggcatcaatagcgttagactttagacttaccttagttaaactaattttaatttttgaaaaggtgaatatgtgttaaaataaagcaaaatcatttcgatataaataggatgaatataaatactgttaatattgattacactaacataataatgaaataagataggagattcctgttatgactgttgaagaaagatccaatacagccaaagttgacattttaggggtcgattttgataatacaacaatgttgcaaatggttgaaaatattaaaaccttttttgcaaatcaatcaacgaataatctttttatagtaacagccaaccctgaaatagtgaattacgcgacgacacatcaagcgtatttagagttaataaatcaagcgagctatattgttgctgatgggacaggagtagtcaaagcttcgcatcgtttaaagcaacctctagcgcatcgtatacctggtattgagttgatggatgaatgtttgaaaattgctcatgtaaatcatcaaaaagtatttttgctaggggcaactaatgaagttgtagaagcggcacaatatgcattgcaacaaagatatccaaacatatcgtttgcacatcatcacggttatattgatttagaagatgagacagtagtgaaacgaattaaactgtttaaacctgattacatatttgtaggtatgggattccctaaacaagaagaatggattatgacacatgaaaaccaatttgaatctacagtgatgatgggcgtaggtggttctcttgaagtatttgctggggctaaaaagagagcgccttatatctttagaaaattaaacattgaatggatatatagagcattaatagattggaaacgtattggtagattgaagagtattccaatatttatgtataaaatagccaaagcaaaaagaaaaatgaaaaaagcgaaatagtcatgatgataaaaataaaaccgaggaaatccttaaatggagattctcggttttttcggtttatttaataacgaagcgggcctcatcgagtttgtttctaaattctttttgttcggctttggatttctttttaaaatcgttaaggaaagcctcatatttaggtaatacatcatcaagttcaccgtaatcttttaactttccgccttcaatccaagcaatcttagtacaaaattgtctcacttggcctaagttatgactaacgaaaaagatggttttgttttgctctttaaactcgtaaattttatctaaacatttttgtgcaaaagtttggtcacctacagataaagcttcgtcaatgactaagatatctggattaactgtgatattaattgaaaaaccaagttttgcacgcataccacttgaatactttttaactggttgataaataaactcaccaagttcactaaattcaataatcttaggtgtcatcgctttaatttcttttcgcttaaagcccatacataacattttaaattcgatattttcaatccctgtaagttgtccactcaagccagcactaattgcgataacgctgacttcaccattacgatccactttgccaacagtaggcgacaaagaaccgccaatgatattgctcaacgttgatttgccggaaccattgatgccaacaagccctatgacgtcgccttcatatgcttttaaactaatgtcatctaaagcgaaaaatgttttgtttttatgtttgggaatgagcgcatctttcatacgttctttatttgtacgataaatacgatattcttttgttacatttttaatgtttaccgaaacgttcatttgtagaccttccttattcacatttatctagattataatatactactcaacagttgttaaattttaaaacctgttgtaaagtgtatagaagattttgttattatcagagttggtgttttgatacaaaatgttaagcatcaatgataacaatgatatttaaaaactaaacttatttcaacttacatgattgtatactataatgtatttgtaataaactaatattttaaagaactagacaataattttgatagcatccatgtatagtgatagtatttacaacaattattataatactatttagttaagtagagaaatagttaaacatttgaaagtgtggtttaatggaatgtcagcaataggaacagtttttaaagaacatgtaaagaacttttatttaattcaaagactggctcagtttcaagttaaaattatcaatcatagtaactatttaggtgttgcttgggaattaattaatcctgttatgcaaattatggtttactggatggtttttggattaggaataagaagtaatgcaccaattcatggtgtaccttttgtttattggttattggttggtatcagtatgtggttcttcatcaaccaaggtattttagaaggtactaaagcaattacacaaaagtttaatcaagtatcgaaaatgaacttcccgttatcgataataccgacatatattgtgacaagtagattttatggacatttaggcttacttttacttgtgataattgcatgtatgtttactggtatttatccatcaatacatatcattcaattattgatatatgtaccgttttgttttttcttaactgcctcggtgacgttattaacatcaacactcggtgtgttagttagagatacacaaatgttaatgcaagcaatattaagaatattattttacttttcaccaattttgtggctaccaaagaaccatggtatcagtggtttaattcatgaaatgatgaaatataatccagtttactttattgctgaatcataccgtgcagcaattttatatcacgaatggtatttcatggatcattggaaattaatgttatacaatttcggtattgttgccattttctttgcaattggtgcgtacctacacatgaaatatagagatcaatttgcagacttcttgtaatatatttatatgacgaaaccccgctaaccattaataaatggaagtggggttcatttttgtttataatttaagtaaataacatattaagttggtgtattatgaacgttttaataaagaaattttatcattcggtagttcgaatactttctaaaatgattacgcctcaagtgattgataaaccgcatatcgtatttatgatgacttttccagaagatattaagcctatcatcaaagcattaaataattcgtcgtatcagaaaattgttttaacaacaccaaaacaagcgccttatttatctgatcttagcgacgatgttgatgtgatagaaatgactaatcgaacattggtaaaacaaattaaggctttgaaaagcgcgcagatgattattatcgataattattacctattactaggtggatataataagacttctaatcaacacattgttcaaacgtggcatgcaagtggtgcattaaaaaactttggattaacagatcatcaagtcgatgtgtctgacaaggcaatggttcagcagtaccgtaaagtttatcaagcgacggatttttacttagtgggttgtgaacaaatgtcacaatgttttaaacagtctttaggtgcaacagaagagcaaatgctgtattttgggcttccgagaattaataaatattacacagctgatagagcaacggttaaggcagagttaaaggataaatatggaattacaaataagttggtattatatgtaccaacatatagagaagataaagcagataatagggctattgataaagcttattttgaaaaatgtttaccaggatatacactgattaataaattacatccatcaattgaagattcagacattgatgacgtatcttcaatcgacacgtctacattaatgctaatgtcagatataattattagcgactatagttcgctgccaatagaagctagcttgttagatattccaactatattttatgtgtatgatgaaggaacatatgataaggtgagaggcctgaatcaattttacaaagcaataccggatagctacaaagtgtatactgaagaagatttaataatgacgatacaagaaaaagaacatctattaagtccgttatttaaagattggcataagtataatactgataaaagtttacatcagctcacagaatatatagataagatggtgacaaaatgaggtttacgataatcatacctacatgtaataatgaggcaacaattcgacaattgttaatatctattgagagtaaagaacactatagaatcctttgtattgatggtggttctactgatcaaacaattcctatgattgaacggttacaaagagaactcaagcatatttcattaatacaattacaaaatgcttcgatagctacgtgtattaataaaggtttgatggatatcaaaacgacagatccacatgatagtgacgcatttatggtcataaaaccaacatcaatcgtattgccaggtaaattagataggttaactgctgctttcaaaaataatgataatattgatatggtaatagggcagcgcgctttcaattaccatggtgaatggaaattgaaaagtgctgatgagtttattaaagacaatcgaatcgttacattaacggaacaaccatatttgttatcaatgatgtcttttgacggaaagttattcagtgctaaatttgctgaattacagtgtgacgaaactttagctaacacttacaatcacgaaatacttgtcaaggcgatgcaaaaagctacggatatacatttagtttcacagatgattgtcggagataacgatatagatacacatgctacaagtaacgatgaagattttaatagatatatcacagaaattatgaaaataagacaacgagtcatggaaatgttactattacctgaacaaaggctattatatagtgctatggttgatcgtattttattcaataattcattaaaatattatatgaacgaacacccagcagtaacgcacacgacaattcaactcgtaaaagactatattatgtctatgcagcattctgattatgtatcgcaaaacatgtttgacattataaatacagttgaatttattggtgagaattgggatagagaaatatacgaattgtggcgacaaacattaattcaagtgggcattaataggccgacttataaaaaattcttgatacaacttaaagggagaaagtttgcacatcgaacaaaatcaatgttaaaacgataacgtgtacattgatgaccataaactgcaatcctatgatgtgacaatatgaggaggataacttaatgaaacgtgtaataacatatggcacatatgacttacttcactatggtcatatcgaattgcttcgtcgtgcaagagagatgggcgattatttaatagtagcattatcaacagatgaatttaatcaaattaaacataaaaaatcttattatgattatgaacaacgaaaaatgatgcttgaatcaatacgctatgtcgatttagtcattccagaaaagggctggggacaaaaagaagacgatgtcgaaaaatttgatgtagatgtttttgttatgggacatgactgggaaggtgaattcgacttcttaaaggataaatgtgaagtcatttatttaaaacgtacagaaggcatttcgacgactaaaatcaaacaagaattatatggtaaagatgctaaataaattatatagaactatcgatactaaacgataaattaacttaggttattataaaataaatataaaacggacaagtttcgcagctttataatgtgcaacttgtccgtttttagtatgttttattttctttttctaaataaacgattgattatcatatgaacaataagtgctaatccagcgactaggcatgcaccaccaatgatagtgaataatggatgttctgcccacatacttttagcaacagtatttgccttttgaataattggctgatgaacttctacagttggaggtccataatctttattaataaattctcttggatagtccgcgtgtactttaccatcttcgactacaagtttataatcttttttactaaaatcacttggtaaaacatcgtaaagatcgttttcaacataatatttcttaccatttatcctttgctcacctttagacaatatttttacatatttatactgatcaaatgagcgttccattaatgcattccccatcatattacgttgcttctcgccaccaaggtttttatagtctcccgcacccatgataacttgattaattctaaatttacctcgtttggtagtaatcgtatggttgtaatttgctgtatcacttgatccagtttttaaaccatctgtaccaggcaaactcatttttgcaccttccaatgaaaagttgaatgtgtaatacgtaactgcatgcgttgttggtgctaactgctttgtaaagtctaatattttaggtgtctctttaatcacgtgtaaatctaaaatggcatagtctctagcagtcgttacagtacgttcttggtctttatactttgttggtgcaaatgaacgtaatcttgaattttcagcacccgttggattgacgaaatgtgtatttttcattccgatagctttagctttgttattcattaaatcaacgaaatcgctggtgttttttgataccttcttagctaaaattaatgccgcggcattactagaattagatactgtaatttgtaataggtctgcgattgtccatacttgtccaggatatagtttcgtattactcaactcaggtagtgtagacataatatattctttgttcgtcattgtgactgtgtcatcaagtgaaagctgccccttatttacagcttccaatgttaagtacattgtcattaatttagtcatagacgctggattccacttagtatcgatattgtattgatacagtaattgtccagtttgacttacattaacagcactcgtcggttcgtatgcagccgacaaacctgcataaccatattgatttgctgcttgtacaggggttacgtcactgttagtagcttgtgcatatggtgtcataatacttaatgttaaacataaaatgatgataatagatattaaatttttcataaagcgttaatcttcccttttccaattcttaaatattccctaaaagcaatggttattcctacttacggaaatcattgctaattcacttcaccttaattaaattgttgaaaataaagttttctgcagttaatttgaaaaataatgcaaatatattacgtgtgtagctaaaggtgttataatgtttgtacgaagagcaaacttactcaaaagcgattaattttcatgttttaatataaagactttgagaagttattacaaaaaatgcaatagaaatattctatcatataaatgttatgagcggtattttggggcaacactttatttgatttttaaagttttgttgggagaaagtatatgatagaaatgcatgtatctatctaaatgaattaactataaatttcaaacagaagaggtaaaactatgaaacgagaaaatccattgtttttcttatttaaaaaactatcatggccagtgggtcttatcgttgcagctatcactatttcatcactagggagcttaagtggactattagtgccactgtttactggacgaattgtagataaattttccgtgagccatatcaattggaatctaatcgcattatttggtggtatctttgtcatcaatgctttattaagcggattaggtttatatttattaagtaaaattggtgaaaagattatttatgcgatacgctcagttttatgggagcatatcatacaattaaaaatgccattctttgacaaaaatgaaagtggtcaattaatgagtcgattaactgacgatacgaaagtgataaatgaatttatttcacaaaagctacctaacttattaccatcaatcgttacattagttgggtcactaatcatgttatttattttagattggaaaatgacattattaacatttataacgataccgatattcgttttaattatgattcctctaggtcgtattatgcaaaagatatcgacaagtacacaatctgaaattgcaaacttcagtggtttgttagggcgtgtcctaactgaaatgcgtcttgttaaaatatcaaatacagagcgtcttgaattagataatgcacataaaaatttgaatgaaatatataaattaggtttaaaacaggctaaaattgcggcagttgtacaaccaatttcaggtatagttatgttgctaacaattgcaattattttaggttttggtgcattagaaattgcgactggtgcaatcactgcaggtacattaattgcaatgatattttatgttattcagttatctatgcctttaatcaatctttccacgttagttacagattataaaaaggcagtcggtgcaagtagtagaatatacgaaatcatgcaagaacctattgaaccgacagaagctcttgaagattctgaaaatgtattaattgatgacggtgtattgtcatttgaacatgtagactttaaatatgatgtgaagaaaatattagatgatgtgtcgttccaaatcccacaaggtcaagtgagtgcttttgtaggcccttctgggtctggtaaaagtacgatatttaatctgatagaacgtatgtatgaaattgagtcaggtgatattaaatatggccttgaaagtgtctatgatatcccgttatctaagtggcgacgcaaaattggatatgttatgcaatcaaattcgatgatgagtggtacaattagagacaatattttatacggaattaatcgtcatgtttcagatgaagaacttattaattatgctaaattagcgaactgtcatgattttatcatgcaatttgatgaaggatatgacacgcttgtaggtgaacgaggattgaaactgtctggcggacaacgtcaacgtattgatattgctagaagttttgttaaaaatcctgatattttgttacttgatgaagcaacagctaatctcgatagtgaaagtgaattgaaaattcaagaagctttagaaacattgatggaaggtagaacaacgattgtcattgcgcatcgtttgtctacaattaaaaaagccggtcaaattatattcttagacaaaggacaggtaacaggtaaaggtacgcattcagaactgatggcatcacatgcgaagtataaaaactttgtagtgtctcaaaaattaacagattaattttatatatataagtaagcttggagcaaatacacatataccatcgaggaaattaaagtgtggcacattgatggatatagatgttaataaattgcttcaagcttttgtctattttaaatcatttgagaagttacgacataataattcttaaattaatgaaatcgatattttaagaaaaaaatgctcatggtataatacaagttataagcaaacatacatatattaaatactgtagccacgagtcataattcttcatattttacatagcaatttaactgattttagagtccacggtacagaagtttgatatttcaatgtttctaaatttttaaaaaattaaatcataggtgggtgccaaatgtttttattaatcaacattattggtctaattgtatttcttggtattgcggtattattttcaagagatcgcaaaaatatccaatggcaatcaattgggatcttagttgttttaaacctgtttttagcatggttctttatttattttgattggggtcaaaaagcagtaagaggagcagccaatggtatcgcttgggtagttcagtcagcgcatgctggtacaggttttgcatttgcaagtttgacaaatgttaaaatgatggatatggctgttgcagccttattcccaatattattaatagtgccattatttgatatcttaatgtactttaatattttaccgaaaattattggaggtattggttggttactagctaaagtaacaagacaacctaaattcgagtcattctttgggatagaaatgatgttcttaggaaatactgaagcattagccgtatcaagtgagcaactaaaacgtatgaatgaaatgcgtgtattaacaatcgcaatgatgtcaatgagctctgtatcgggagctattgtaggtgcgtatgtacaaatggtaccaggagaactggtactaacggcaattccactaaatatcgttaacgcgattattgtgtcatgcttgttgaatccagtaagtgttgaagagaaagaagatattatttacagtcttaaaaacaatgaagttgaacgtcaaccattcttctcattccttggagattctgtattagcagcaggtaaattagtattaatcatcatcgcatttgttattagttttgtagcgttagctgatctatttgatcgttttatcaatttgattacaggattgatagcaggatggataggcataaaaggtagtttcggtttaaaccaaattttaggtgtgtttatgtatccatttgcgctattactcggtttaccttatgatgaagcgtggttggtagcacaacaaatggctaagaaaattgttacaaatgaatttgttgttatgggtgaaatttctaaagatattgcatcttatacaccacaccatcgtgcggttattacaacattcttaatttcatttgcaaacttctcaacgattggtatgattatcggtacattgaaaggcattgttgataaaaagacatcagactttgtatctaaatatgtacctatgatgctattatcaggtatcctagtttcattattaacagcagctttcgttggtttatttgcatggtaatatgtcgaagagtgactatgataatacattttaactaataaatatgtccaggtatgtcgtctattgatataggtgagatgcttggacttttttattattgatataaaggtatttaaatatttttaaagttaccgaaattgaagcattataaaaaccaagtgcacatggtaatacacttggcttttatgggaaatgaatattattgtacatatgacagtaaggactaggtacagtcatagtacttcgagcaaaatttgttttgttattataaacaacacaaaggagataacttctctattgaagaagttaaaaacattatagcagacaatgaaatgaaagtaaattaaaaattcagaatatttttaattattatattgtgagtgatatttattagggaaagctattcttcatataaattagttaaatagtaaatctttgttagaactctttccatagagttgtgacagcatttttgttgtgctactatttttatagtctaataaatatataaaggggatggtttcgtgaataaaacggttaaagatttaatactagttgtcttaggttcatttatctttgctgcaggtgtaaatgcatttattatttctggtaacttaggtgaaggcggggttacaggtttagcaattattttatattatgcgtttcatatttcaccagccatcactaacttcttggtcaacgcagtattgattgccataggttataaatttttgagtaagagaagtatgtacttaactattcttgtaacaattcttatttcaatatttttgagtttaacagaatcatggcaagtagaaactggaaacagcattgtgaatgccatttttggtggtgtaagcgttggactaggaatcggagtaattatccttgcaggcggtacaacagcaggtacaacaattttggcgagaattgcaacgaaatacctcgatgtaagcacgccatatgctttgcttttcttcgatatgatcgttgttgcaatttcacttacagttattccacttgataaagtattagtaacagtaatatcactttatataggaacaaaagtgatggaatatgtcatagaaggtttaaacactaaaaaagctatgacgattatttcaactaatcccgacaaacttgccaaagcaatagacgagcaaattggaagaggtttaaccattttaaacggacatggctattatacgcgtgaagaaaaagatgtcttatacgttgttatttctaaaacacaagtttcaaaagcaaagcgattaattaaacaaatcgataaagatgcattcctcgtaattcatgatgtaagagatgtctatggtaatggctttcttgcagatgaataaataaatggtatgagcacacatacttaaatagaagtccacggacaagtttttgaactatgaagacttatctgtgggcgttttttattttataaaagtaatatacaagacatgacaaatcgagctatccaatttaaaaagtaatgttagtcaataagattgaaaaatgttataatgatgttcatgataatcattatcaattgggatgcctttgaaaattgataatttaaaaatagaaattattttttataaacagaaagaattttattgaaagtagggaaattatgaatcgtttgcatggacaacaagttaaaattggttacggggataacacgattataaataaattagatgttgaaataccagatggcaaagtgacgtcaatcattggtcctaacggctgcgggaaatctactttgctaaaggcattgtcacgtttattggcagttaaagaaggcgaagtatttttagatggtgaaaatattcatacacaatctacgaaagagattgcaaaaaaaatagccattttacctcaatcacctgaagtagcagatggcttaactgttggggaattagtttcatatggtcgttttccacatcaaaaaggatttggtagattaactgctgaggataagaaagaaattgattgggcaatggaagttacaggaactgatacattccgacaccgttcaatcaatgatttaagtggtggtcaaagacaacgtgtttggattgcaatggcattagcacaaagaactgatattatctttttagacgaaccaacaacatatttagatatctgtcatcaattagaaatactagaattagttcagaagctaaatcaggaacaaggttgtacaattgtcatggttcttcatgatatcaaccaagcgattcgtttctcagatcatcttattgcgatgaaagaaggggatatcatcgctacaggttcaacagaagacgtattaacacaggaaattttagaaaaagttttcaatattgatgttgttttaagtaaagatcctaaaactggaaaacctttattggtaacttatgacttatgtcgcagagcttattcttaattaagtaagttaatatgataaaaaggacaattaacatgacaaatagagagaattcaacgccattgaagtttttagcctatattataggtttaagtatgatactactaatcacactatttatttctacattaataggtgacgccaaaattcaagcctctacaattatagaggctatttttaattataatcctagcaatcaacagcaaaacatcatcaatgagattaggattcccagaaatatagcagcagtaattgtgggtatggcgcttgcagtttctggtgcgattatacaaggtgttacccgtaatagtcttgctgatccggcgctcataggtttaaattcaggtgcttcatttgctttagcattaacatatgcagttttaccaaacacttcatttttaatattgatgtttgctggatttttaggtgctattctaggaggtgctattgtattaatgataggccgatctagacgtgatggatttaatccgatgcgtattattttagcgggtgcagcagtaagtgctatgttaacagcgctaagtcaaggtattgcattagcttttagactaaatcaaacagtaacattttggactgctggaggcgtttcaggcacaacatggtcacaccttaagtgggcaattccattaattggtattgcgttattcattatattaacaattagtaaacaacttaccattttaaatcttggtgaatcattagctaaaggtttaggtcaaaatgtaacaatgatcagaggcatatgtttaattattgctatgattctagcaggtattgcagttgctatcgctggacaagttgcatttgtaggtttgatggtacctcatatagcaagatttttaattggaactgattatgctaaaattctaccattaacagccttgttaggtgggatactcgtgcttgttgccgatgtgatagcacgatatttaggagaagcgcctgttggtgcaatcatttcatttatcggtgttccttactttttatatttagttaaaaaaggaggacgctcaatatgattagttcaaataataaacgcagacaatggattgcactggctgtttttagcattctactatttctaggttgtacttggagtattacctcaggtgaatacaacatacctgttgaaagatttttcaaaactttaattggacaaggtgatgccattgatgagttaatcttattagatttcagattacctcggatgacgattactattttggctggcgcagcgcttagtattagtggtgcaatagtgcaaagtgtcacgaaaaatccaatagctgaacccggtatattaggtattaacgcaggtggcggatttgcaatcgcattatttattgcaattggtaaaattaatgctgacaactttgtttatgtactgccgttaataagtatactaggtggtatcgccactgcattgattatttttattttcagttttaataaaaatgaaggtgttacacctgcgagtatggtattaataggtgtaggtttacaaacagcattatatggtggctcaattacaattatgtcaaaatttgatgataagcaatctgatttcatcgctgcttggtttgcaggtaatatttggggtgacgaatggccatttgtcattgcatttttaccgtgggtgttgattattattccttacttactatttaaatcgaatacactaaatattattcatacgggtgataatattgcacgaggtctaggtgtaaggttaagcagagaacgtttaatattattctttatcgcagtgatgttatcatctgctgctgtagcagtagcaggttcgatttcgtttatcggattaatgggtccgcatattgccaaacgtatcgttggaccacgtcaccagttgtttttaccaattgccattttagtaggggcatgtttacttgttatagctgatacaattggcaaaattgtattacaaccaggtggggttccagcaggtattgtcgtagcaattattggtgcaccgtatttcttatatttaatgtacaaaacgaaaaatgtatagtgtcaaaggacacaacttattgctatgaaaggcactttattataaggcttttcatagcattttttatttaatgagccactcaagactatttattttttatttaatgagccactcaagactatttattttttcaataatgaaccattaagttatcaagaggatcttatcaaaaatatatttgataacggtatcaggttaattctttatgatagcgcattcatttattctgttttatactatgactgataataccaaggaggtacaacatgatgaaaaagttaatcaataaaaaagaaacatttttaactgatatgcttgaaggattgttaattgcgcacccagagttagatctgattgctaatacagttattgtaaaaaaagctaagaaagaacatggtgtagcaatagtctctggaggtggaagcggtcatgaacctgcgcatgccggttttgttgcagaaggtatgctagatgcagcggtttgtggcgaagtatttacatcacctacaccagataaaatattagaagctattaaagcagtagatactggtgatggtgtattactagttgtaaaaaactatgcaggtgacgtgatgaatttcgaaatggcacaagagcttgcagaaatggaaggtataaatgttcaaactgttattgttcgtgacgacattgctgtgacaaacgaagcacaacgtcgtggtgttgcaggaacagtgtttgttcataagcttgctggttatcttgctgaaaaaggttattcattaacagagataaaatcgcgtgtagaagcgttgttacctgaaattaaaagtattggtatggcaattgagccaccgcttgttccaactactggaaaatatggctttgatattgaagacgacaaaatggaaatcggtattggtatacatggtgaaaaaggtattcatagggaagaagtaaaggatattgatcatattgttggaacattgttagacgaattgtataaagaagttactgccaatgatgtcatattaatggtaaatggtatgggtggtacgccgttatctgaattaaatatcgtaactaaatatattcaacaaaatttagctgcaagaacggttaatgttgctaaatggtttgttggtgattatatgacatctttagacatgcaaggtttttctataactatcgtgcctaataaaccagaatatttggaagcatttttagcaccaacaacaagtcaatactttaaataagaagtgaatatgaataaatatacatttatgaggtggcacaaatgaaagtgaatgatatgaaagcacgtttattaaatttagaagaaacgtttaaaaaacatgaatctgaattaactgaattagatcgagcaattggtgatggtgaccacggggttaacatggttcgtgggtttagtagtcttaaagacaaacttgatgatagctcaatgcaatcattgttcaaatcaactggtatggcattgatgtcaaatgttgggggtgcatctggaccactgtatggctttagctttgttaaaatgtctgcagtcacgaaagatgatatggataatcaagatttcattacactaattcaggcatttgccgaagcggttgaatcacgtggtaaagttactttaaatgaaaagacaatgtatgatgtaatagcgcgagcagcagagaagcttaaaaatggtgaaactttaacattcaatgatttacagcaattagcagataatacaaaagatatggtagcaacgaaaggtagagctgcatattttggagaagaatcaaaaggttatattgatccaggtgctcaaagtatggtttatattttaaacgctttgattggagatgaagataatgcctaaaattatacttgttagccacagtaaagaaattgcaagtggtacaaaatctttgttaaagcaaatggcaggtgacgttgatattataccaatcgggggattaccagatggttcaattggaacttcatttgatatcatccaagaagttttgactaaattagaggatgatgcattgtgtttttacgatattggatcttcagaaatgaatgtagatatggcaattgaaatgtatgatggtaatcatcgtgtgttaaaagttgatgcaccaattgttgaaggcagttttatcgcagcagtaaagctatcaatcggcggttcaattgatgatgcattagcagaaatgaaacaatcattttagttaaaatttactaataatgaaaaatgtaaacctttttcaaatgaaactttataaaaaatatgatagtatatatgtaaatgtttaataaaatctggagaaataggaggacattgccatgcaacaccttataaaaaaacatgtattgaatggcgagtttgatttagtacgacaattgatgtccgaaacagattttatggaatttgaagaagcatatatttcaagtgcgcatgaagtagaaagtatgatgttttatacatgtattttagatatgattaagtacgaagaatcatctgaaatgcatgacttagcatttttattgcttgtgtatccactaagtgaatatgaaggtgctttggattctgcttattatcatgcagacgcttccataaaacttactgacggcaaagaagttaaaagtttgttacaaatgttattattgcatgcgataccaacacctgttatttcagataagaaggcttttgatatcgccaagcaaattttaaaattagatcctaataataatgttgctcgtaacgtcttaaaagacactgccaaacgtatggacaacgttgttgttgatataaatgaattacaccaacgtaatgcacgttaattacatttcaattatattagcttaataatagttttaacatttggttgggttgggacatatgttccagccttttttaatacttaaaaactaacgaagtatacttgtgtgcacaaatggtttttatacaacattttataaatttatacattttaataaagaacatacgatagatggtttaaaccttgttaactgagaaattttgatatgtattcttcgaaatttaactaaatatacgaaattcaagaagcacaataattaatcatttttcctatacaaaagttcgtatgactgcattataaaagcataaatttataatttttttaaatgtcattgaacgtgataatgtgaatggattgagcaattttgaaaaagtgaaaaataacctatgcgacttgcaattaattttcagtacgttataatgcacactgtgcaaaattaaggaggtctattattcacatgatgatgaataaagaagcaacaaaaattggatttgcctacgtcggcattgtagtgggcgcaggattttcaactggacaagaagttatgcaatttttcactaaatatggcttgtgggcttatttaggtgttattatatctggttttattttagcttttattgggcgccaagtagcaaaaattggtactgcctttgaagcgacaaatcatgaatcaacattacaatacgtattcggtgaaaagtttagtaaagtctttgattatattttaatcttcttcttatttggtatagctgtaaccatgatagctggtgcaggcgcaacatttgaagaaagttataacatacctacatggctaggtgctttaattatgacattagcgatttatattacgttgctattagactttaataaaatagtacgtgcactaggtatcgttacaccatttttaattgttttagttgtattaatcgctggcgtttatttatttaaaggtcatgtttcattagcagaagttaaccaagtagtgcctgaagcaagtatttggaagggaatctggtttggtacaatatatggtggattagctttttctgtaggttttagtaccatcgtagcaatcggtggggatactgaaaagcgtacagtgtcaggtgcaggcgcgatgtatggtggtattatctatactgtattactagcattgatcaactttgcattgcaaagtgaatatccaactattaaaaatgcctcaattcctacattgacgttagcaaataatatccatcctttaatagcaacagtgttatctgttattatgctggcggttatgtataatactattctaggactaatgtattcatttgcagcacgttttacagaaccatacagtaaaaattatcatatctttattattataatgatggtagcaggttatttattaagtttcgtaggatttgctgaattaattaataagttatatacaattatgggatatgtaggcttatttattgtagtagctgtaattattaaatatttcaaacgtaaaaatgcggataaaaaacatattgcttaatatcatatgagggatatccgaaactttacaattgaatcactttgttttaaccttaaaagcaattcgtctctactcttatcgggcgaattgctttttatatttattcagtctattaatatgagcgtctaacaaatagagaggtacgatgtaatgaataaagataataaatggacgatgataactgcgctttttataactgtaatcagtgtattgttagcatttcatctgaaacaacattatgaccaaattacaaatgagaaccatgctaataaagacaaaattaatattaaaaataaaaatgtgcgcatttatcaaaaccttacatacaatagagttttccctaacagtaaattagatattattacacctgttgatatgtcttctaatgccaaactgccagttattttttggatgcacggtggtggttatattgcgggtgataagcagtataaaaacccattattagcgaaaattgctgaacaagggtacattgttgtgaatgtaaattatgcattggcgccacaatataaatatcccacaccattaattcaaatgaatcaagcaactcaattcattaaagaaaataaaatgaatttacctattgattttaatcaagtaattattggcggtgattctgcaggtgctcaattagctagccaatttacggcaatacagacgaatgatcgcttaagagaagccatgaaatttgatcagtcattcaaaccatcgcaaattaaaggtgctatactatttggtggtttttataatatgcaaacagttagagaaactgagtttccaagaatacagttatttatgaaaagttatactggcgaagaagattgggaaaagagttttaaaaacatttcacaaatgtcgacagtaaaacaatcgacaaaaaattatccaccaacatttttatctgttggagatagcgatccattcgaaagtcaaaatatagaattcagtaagaaattacaagaattgaatgtaccagtagatactttgttttatgatggtacgcatcatttacatcatcagtatcaatttcaccttaataaaccagaatcgatagataatatcaaaaaagtgttacttttcttaagtcgtaatacatcttctagtggtattcaaactgaagagaaaccacaaatagaaaatccgagtaatgaattaccgttaaatcctttaaactaatgataaacagtagtaatttattacttaagcaacatttaagatcttcaaattgaaaacgaagaatttaaaacatgtggggctaatgtgtaagagtctgagatataataaattgttagcggttctttatcatttctatctcaccctattatgatgtgacatttattttacaaactaatttgttttgaacctgaaaataactttttacaactaaattgtcgaaaaacagtgtgtacatgatataataaatttataaattgaaaagaattcaaaagaaaaattaaaatatagattgagcacgaagtgatttgaaataaggttgtgaaagggaatgacaaggtcagcattaaaaccatttaaaaataaacgcgttatggttactggacgtatacaacgtgttttgtttaaaaattatttagatagacatagcacatttaagccgaatgtaaggatattattaaaagatgtatttgtttcaggtgtatcaatagatcatttatggttatatgagacaaataaatactatgcattggcaatggaacttattcatcaacgagtaaaatttagtgcgaatgttgtaccgtattacaaaataaatagaaataataatttattcgtacaagattatggaattaagcgtaaaggtaggttaattactgaagaagcttacaatcaaaacaatcagtatcaggataagatatatgaaaaattaccggatatagattttagactcgaagatttttatagtaaggaaaactaaacaacatatataaagcaccactaatcgtagttgatagttgatcaattacacattagtggtgctttattttgaatttaaatttgataaatgaataagagtatacgcattcatttaagattagatgacattgataagtatgagtaatgtattaggtaaccattaaattcgttgttatgcgattctgatacaagattatgataaaatagctttaattaagaattttagccatcatatagtcatcgtaatatttaccatcgataaataacttatcttttaaaacgccttcgatttgaaaatcggcacttttaaaaagctcgagggcaggttggttattgagtggtacatttgcttcaattcggtgtatttgattgtttaaacaccaagccataatggcatcaagaagtgcttggccaattccacgatgttgatataatttctttacacctaaatcaattttagcaacatgtttaatgcgttgaaatggtgtcgtattaacaaaggcaaagccaacgagttgttcatcactttcagcaacaaagatgactttatgtggagaagtgatatattcttctaattgtttactagccgatgtgacgctaggatcatattctcctggtgtgtagaacatatacggagattcgtcgtatattttcgctaacattgaaatgaaattttctacatctttgatactaactctacgtataatatgggccataaaaagcctccagtattttgaaattttaaaacatttgctactattataatatatatgtaactaaaaggtggagtaatatgttttttggttacagtttaaaggagtattttagatgaaacctaaagttttattagcaggtggaacaggatatattggtaagtatttaagtgaagtgattgaaaatgatgctgaactttttactatatcaaaatatccagacaataaaaaaacagatgatgttgaaatgacttggattcagtgtgatatatttcattacgaacaggttgttgcagcaatgaatcaaatagatattgctgtattctttatcgacccaacaaagaattctgccaaaataacacaatcatcagcaagagatttaacattaatcgcagcagataattttggtcgagcagcggctatcaatcaagtaaaaaaagtaatctacatacctgggagtcgttatgataatgaaacaattgaacgcctaggtgcatatggcacacctgtagaaacaacaaatttagtttttaaacgttctttagttaatgtagaattacaagtttcaaagtatgatgatgttagatcaacgatgaaggtagttttaccaaagggatggacattaaagaacgttgtaaaccattttattgcatggatgggttacactaaaggaacttttgtgaaaacagaaaaatcacatgatcaatttaagatatatattaagaataaggtgcgaccgctcgcagtatttaaaatagaagaaacagctgacggaataataactttaattttattgagtggaagtttagtgaaaaaatacacagttaatcaagggaagttagaatttagattaatcaaagagtcggcagtcgtttatatacatctatacgattatatccctcgattattttggccgatttattactttatacaagcaccaatgcaaaaaatgatgattcatggctttgaagttgactgccggattaaagattttcaaagtcgattaaaatcaggagaaaatatgaaatatactaaatgatattgggtgatatggatgcaaatactactagtagaagatgacaatactttgtttcaagaattgaaaaaagaattagaacaatgggattttaatgttgctggtattgaagatttcggcaaagtaatggatacatttgaaagttttaatcctgaaattgttatattggatgttcaattacctaaatatgatgggttttattggtgcagaaaaatgagagaagtttccaacgtaccaatattatttttatcatctcgtgataatccaatggatcaagtgatgagtatggaacttggcgcagatgattatatgcaaaaaccgttctataccaatgtattaattgctaaattacaagcgatttatcgtcgtgtctatgagtttacagctgaagaaaaacgtacattgacttggcaagatgctgtcgttgatctatcaaaagatagtatacaaaaaggtgatcagacgattttcctgtccaaaacagaaatgattatattagaaattcttattaccaaaaaaaatcaaatcgtttcgagagatacaattatcactgcattatgggatgatgaagcatttgttagtgataatacgttaacagtaaatgtgaatcgtttacgaaaaaaattatctgaaataagtatggatagtgcaatcgaaacaaaagtaggaaaaggatatatggctcatgaataatttgaaatgggtagcttattttttgaaatctcgcatgaactggatattttggatattgtttttaaacttccttatgttaggcattagtctaatcgattatgattttccaatagacagtttattttatattgtttctttgaatttaagtttaacaatgatttttcttatattgacatattttaaagaagtaaaattatataagcattttgacaaagataaagaaatagaagaaattaaacataaagatttagcggaaacgccatttcaacgtcatacagttgattatttatatcgtcaaatctcagcgcacaaagaaaaggttgttgagcaacagttacaattgaacatgcatgaacaaaccattacagaatttgtgcacgacataaaaacacctgtgacagccatgaaattattaattgatcaagaaaaaaatcaagaaagaaaacaggcattactatatgaatggtctcgtataaactcgatgctggatacacagctgtatattactagattagaatctcaacgcaaagatatgtattttgattacgtgtcacttaaacgcatggtcattgacgaaatacaattaacaagacatattagtcaggttaaaggtattggttttgatgttgactttaaagtggatgattatgtttatacagatataaaatggtgccgtatgattattagacagattttgtcaaacgcattgaaatatagtgagaattttaatattgaaattgggacagaattaaatgatcaacatgtttcgttatatattaaagactatggcagaggtattagtaaaaaagatatgccgcgaatatttgaacgaggatttacgtcaacggctaacagaaatgaaacgacgtcttcaggtatgggtctatatttagtaaatagtgtaaaggatcaattaggtattcacctgcaagtcacgtcgactgttggtaaggggacaactgtcagattgattttcccattacaaaatgaaattgttgaacgcatgtcggaagtgacaaatttgtcattttaaacatgcgttttgttacttagaattgatacatcaatgcagcttcaacgttataataagatagatgttagtcatatgttaaattgaagatacaagtgccaaagcctaaaggaaatgaagttaagataaattataggagtgttaaagtggcaattttagaagtaaaacaattaacaaaaatatatggaactaaaaaaatggcacaagaagtgttgcgagatatcaatatgtctattgaagaaggcgagtttattgctattatgggtccctctggatctgggaaaacgacattattaaatgttttaagttcaattgattatatttcacaaggttctattacattaaaaggaaaaaaattagaaaagctttcaaacaaggaattatctgatatacgcaagcatgatattggttttatttttcaagagtataatttactgcatacattgactgttaaagaaaacataatgttaccactaacggttcagaagttagataaagaacatatgttaaatcgttatgaaaaagtagcagaagcattaaatatattggatattagtgataaatacccttctgaattgtctggtggacaaagacaacgaacatctgctgcaagagcgtttattacattaccttctattatatttgctgacgaaccaacaggtgcactggattctaaaagtactcaagatttattaaaacgattaacaagaatgaatgaagcatttaagtctacaattattatggtaacgcatgatcctgttgcagcaagttatgccaatagagtagtgatgctaaaagatggtcaaattttcactgaattataccaaggggatgacgataaacatacctttttcaaagaaataatacgtgtacaaagtgttttaggtggcgttaattatgacctttaacgagataatatttaaaaatttccgtcaaaatttatcacattatgccatctatcttttttcattaattacgagtgtagtattgtattttagctttgtagcattaaaatacgcgcataaactaaacatgacagagtcatatccaattataaaggaaggctcacaagtcggaagctactttctatttttcatcataattgcatttttgttatatgccaatgtgttatttattaaacgacgaagttatgagcttgcattatatcaaacattaggtttatctaaattcaacattatttatatactaatgctcgaacaattactaatatttataattacggcaatattaggtattattattggtatttttggttcgaaactgttattaatgattgtctttacattattaggaattaaagaaaaggttccaattatttttagtttgagggcggtatttgaaacattaatgttaatcggtgtcgcttattttttaacatctgctcaaaattttatattagtgttcaaacaatctatttcacagatgtcaaagaataaccaggttaaagaaacaaatcataataaaattacatttgaagaggttgttttaggcatcttaggtatagtattgattaccacaggatactatctatctttgaacattgttcaatattatgattctatcggtacacttatgtttattttattgtcaactgtgattggggcatacttattttttaaaagctctgtttctctagtttttaaaatggtaaagaagtttagaaaaggtgttataagtgtaaatgatgtcatgttctcatcatctattatgtatcgtattaagaaaaatgctttttcacttacggtcatggcaatcatttcagcgattactgtttcagttctttgctttgctgctataagtagagcgtccttatcaagtgaaataaaatatactgcaccacacgacgttacaattaaagaccaacaaaaagctaatcagttagcaagtgaattaaacaatcaaaaaattcctcatttttataattataaagaagtaattcatacgaaattgtataaagataatttatttgatgtaaaagcgaaagaaccatacaatgtaacaattactagtgataaatacatccctaatactgatttgaaacgtgggcaagctgatttgtttgtagcggaaggttctatcaaagatttagtgaaacataagaagcatggtaaggcaattataggaacgaaaaaacatcatgttaatattaagttacgtaaagatattaataaaatctattttatgacagatgttgatttaggtggaccaacgtttgtcttaaatgacaaagactatcaagaaataagaaagtatacaaaggcaaagcatatcgtctctcaatttggattcgatttgaaacataaaaaagatgctttagcattagaaaaagcgaaaaataaagttgataaatctattgaaacaagaagtgaagcgataagctcaatatcaagtttaaccggaatattattatttgtaacatcatttttaggtattacattcttgattgctgtatgttgcattatatacataaagcaaatagatgaaaccgaagatgagttagagaattatagtattttgagaaagcttggatttacacaaaaagatatggcaaggggactaaagtttaaaattatgtttaattttgggttacctttagttattgcactatcacatgcatattttacatcattagcatatatgaaattaatgggtacaacgaatcaaataccggttttcatagtaatgggattatacatttgtatgtatgctgtttttgcagtgacggcttataatcattccaagcgaacaattagacattccatataaaatatacagatggctttcagtagagtagtggattcgaattcacgaactatactggaagctttttattataaatgaagagaagttatatttttagcatgtatagttgaataatgggttaaaataccatattaataatgaagtaaaggtatgagtgattatgaaagtgttttgaatgaaatatatttaattggtgatgcttttaattgaaaagattaacaggattcaactttgtaaattgtattaaatgtgagaaaataaaagtatattcattgagagatatatgagtcaatgatcgttttaaacaagataagtgtattttaatatgtaaaagttatgtaataaatattgtatcgttgcaaatttcccaaatatatccatttacaatttttagagttgtaaagataaaaaattgcctatacaataactttttcaaaacaaatgcctactactatttaaattttatgtaaaagttaagtttcggaattgttaaaaatttgtaaattgaattgtgggattgtaaattttgtgctattttcatataaggacaaatacagtaaattgtttactgtgaggcatttttgaaattaatatcagtacactaaaattatactgacgattgataataacaaatttgtatcattagtttgtaaattcacttgtcttaatttgaaacaaattataactgaatgtgattggtgacaatcgcttaaatggaggattttaaatgtttagtaagaaaaaagataagtttatggttcaattagaagagatggttttcaatctggatcgtgctgctattgaattcggtaaaatggatttcaatacacatttagatttaaaagcatactcagacaacattaaaacttatgagtcacatggtgacgaattggtacatcaagtaattactgatttaaatcaaacatttatcacaccaattgaacgtgaagatattttatcattatgtgatgcaattgatgatgttttagatgcaattgaagaaacggcagctatgtttgaaatgtattcaatcgaatacacagatgaatatatggctgagtttgttgataacattcaaaaagcagttgcagaaatgaaacttgctgtcggcttattagtcgataaaaaattatcacatatgcgtattcattcaattaatattaaagaatttgaaacaaactgtgatggtattttaagacagtcaattaaacatattttcaatagcgaaacagatccaatcacattaattaaaataaaagatatttatgaaagcatggaagaaattgctgataaatgtcaaatcgtagcaaataattttgaaactattattatgaaaaatagctaaggggagtatatatttatgtcatatataatcatcgtcactatagctgtagttattttctcgctgatatttgactttatcaatggattccatgatacagccaatgcagtagctactgctgtatctactagagcgttaacgcctaaaacggcaattttaatggcagcagtgatgaactttataggtgctttaacatttacgggcgttgcaggcaccattactaaagacattgtcgatccatttaaattggaaaatggattagttgttgtgttagctgcaatacttgcggctattatttggaatttagctacttggttttacggaattccaagttcgtcttcacatgcacttataggttcaattgcgggtgcagcaatcgcatctgaaggctcatttggagtgttacattaccaaggtttcacaaaaattattattgtattaatcgtttcaccgataatcgcattttgtgttggtttcttgatgtattcaatttttaaagttatctttaaaaatgcaaatttaacaagagcgaatcgtaactttagatttttccaaattttcacagcagcgttacaatcattctctcacggtacgaatgatgcgcaaaagtcaatgggtattattacgttggcattaattgttgctaatgtacagaatgatggcagcgttgaaccacagttatgggtaaaatttgcctgtgcgacagcaatggggcttggtactgcaattggtggctggaaaattatcaaaactgtaggtggtaatattatgaaaatacgtccagcaaatggtgctgcggccgatttatcatctgcattaacaatttttgttgcatcatcgctacatttcccattatcaacaactcacgttgtgtcatcatcaatcttaggtgttggtgcttctaaccgagctaaaggtgtaaaatggagtactgcgcaacgaatgattattacatgggtgattacattacctatttcagcattgttagcaggtttactattctatatacttaacttatttttctaattgaaaataaaactaaactgaacttcagtatcacaaacatatcgtggtattgaagttcagttttttatgtaagtagataacatattttatagaatttacgtagaatgaccaagacaaagcattttaattaggaggctaagttataaatgtattccatggaacataaacagttaggtcattaaaatataagtaagcgtaaaataaggatttaatagtttatattcttcaatgaaggaataattaaattgttatcaacttgtttaattaacctaaattgtattggactttatttaatataaatttgtatatgtagacgaaaaagcgtaaaatactggtataacaaattaaatcattatatagtcaacttagttgcattattttgatttttaatatattatgcatttaatttaatcaaataggtaggttattattttttacctaactaccattcatacaaaatataaataagtatgatagggaagggtgagataattttttgtaccaaaatgaaaatttttttcaaaaataaaaaactagcaatctcacatgatgtgaattgctagtatatatcagtacaatttatttaattaatggatgaatgcatagctagaaacttctgaagctggaattgtacggtagttcatattgtatggaccatatgtgtaattcatttcagaaatcaagatactaccatcaccattgacacgttcaacataagcaacatgaccatatggaccaggtgtgctttgcataattgaaccaactgatggtgtgttgtttacttggtaaccatcattagctgcgttaccagcccaatacttagcgtctgaccaatatgtgctaattggactaccagcttgagcacgacggtcaaatacgtaccatgtacattgaccagcagtgtataaattttggtgattaaaagatgatgcattgccattgctacctgttgtagctgttggtgttgtaccacctgatccaccattaggaatttgtaatgtttggttaggcataattaaataaccacgtaagttattggctgccattaattgatcaactgaaacaccatatctgctagcaatgatatttaatgattcaccagcttgtacagtatgagatgatgctgaacctgcttgtggagaagtgtttgacgtattttgtgcatcacttccacctactgagataacttgaccagggaataccaagttgttatctaattggttattttgtttaatactctctactgaagtgttgtatttttgagcaatactccataatgattcaccagattgtactgtatgttgtgtagaagcttgtgcatcatgatgcgttaaaaatgcagctgcaccagatgttgctgttattgcaaatgctaattttttcaaagggactcctccttaaaattaagttttactacttttaaaaattattaagacaatttatatagtaaattaagttttcgttttatattacgatttccatattatcaaaaataagtagctttgtgtggtttgttattatcttgtaatattattaacattttaggatatcggttcatatttttataaatgctgatttgatagtgtataaaagcgttttagtgattttaactaattataaaaaattatattttgtaacattgtaaaatgtaaaattactatacttattaaaggttatttcttttgatgaagcaaaatttactgtaaaatttgacgcataaaacgacggtagaaggaggaattattttgtcgcaaaatacaaatcattcatattatcatcaaaatcagcatgctcaatcaataagtaaagtgtggctttattttatgtattattggattatatttggcataggatgctatctaggtcagtttttaccattaagttggcgacaacccttgtcatttggattactgattattattttagcaacacttgtttttgaaagagcgagacggttcggtttaattatttcacatatttacgctgtagtgatcggcttattgtcatacgcaacgtttaccacgtatttacaaaatttaggaccagatattttctataaaaatatcgcattagcaatttttgcatttatagcatttggtattattggttatttcttcgttggagatgcatcgagtataggcaaatatttattcgttacattaataacattaattattgcgagtctaattggtatttttcttcaaaatcctattttttacactattattaccgtcgttagtctgttgttatttctactttatactttgtatgattttaatcgtttaaaaagaggtgactattcaccaagagaaatgggatttaatctatttattaatttgttgaatattattaaggatatactttatcttgctaatatgttcagaagataaacagttaaattaataaagaaatttgtataaagttttggaataatcaataatgaatatcaaccttaaactggagcgattgtcataagttagaaacttagactgagattttactgataaagcaataaaaatatattaccttaattgtaaagatattattaatcattgaaatgattaactgctatagttctaaagtaaacaaatcttagaagataaactttaaacaggtgtacttgcctttctaattacacttttattagaaaagtaaagtatagctacgtattaattttaaaatcgaaacattaataggaagaagtatagataatataaacaatttaatgttagtttgagctcatctcaaaagtagaatgtgatttaaataagtgtttatttttaaattgaaaatgaatatataactaacaaaagataatagtaatacgttgtagatgtggtcatttaaaattattttgaaaatactaaaaagtagtgtgttttcaattggatagtttaattaaactgactacatctatttttgtaatatttaaatgattgatatataagtttaaaaattaaccattatatagttttatttatttttgatttggtattcgtattgtgttaaatttacgtttaattaaataagttaaatattatagggaatgataaaagtggtacttaaatatagaaagaggtaaagttatggcaaaatcatgcttgcatatacttactaataatgaatatgcgacaacgcgttgccaagatggcatagtcttattttggccaattgacggggaaatcgaactacaaaaatttcgtaaaagtaaaataattgaagatgatatatatattattaatcatctggatgtatttagtattaagaataataaaaaaacgatcatgttgtatttgagtagcgattggtttgcggaattaggctttactttctttaattaccactatacagcaaagttgattaaatcatcctataatttgaaatgtctactattaaaattgacctatcgataccttgataatcagcctcttaatgacgctgatattagaaaattacaggatattattaaaatcattgcaaaagaagcaagtatggataaaaagattgcacaaaatcaatatcgatatgcttattatggtgatttgcgtgatgagctcgaatatatttatcaaaatgtaaatcaacgattgacattaaaaagtgtcgctgataaattatttgtctcaaagtcaaatttgtcatcacaattccacttacttatgggcatgggttttaaaaaatatattgatactttgaaaattggtaaatcgattgaaattctacttactactgatagtactattagcaacataagtgaacatttaggttttagtagtagctccacttactctaaaatgtttaaaagttatatggatataacaccgaatgaatatcgtaatttatcaaaatataataaatgtttaatgctaaagccagaaccactagtaggcaaaatggtgcaagaagtaaaagaaatcatattgaattatattgaacattataaaaaccacctaactgatgttatacatattgatgaagacaaatttgaaacacctaaattgtttcaaacggttattcaaataaatacttatacagaaatgaaattagttttcttagaaggaatctttaaaaccttattgaataagaacagtcaagttgtctttttcatcatgccatcgattctaaaaagtaaaaataccatgtccgaagaagaaaaattcacaatcattaaaacaataattgaaagtgatctaaagatagcatttaatataaatgatattgaaacaacttattttgttgaagaagcttttatgagtgttttcagacaaatatctccaaacgaattaagtaatcataataattacgaagtgcattttgtttttgatttatcattgatggaaattagaacaatttatcgaatgatattaaaattacataacatcatgttgaatgtgaaattaggattgaacattacctgtttatttgaaaaaccttcagtttttaaatcactagtatcacaaataaagcgacttaaattcgattcgttaataatagataatgcaaatttaagtagcccttatttgatgggggaaagtgatgagttactattgaaaaatattttgcattttaaaaatttaaaacaagtaattaatgaattggatattgaacaagaaaagcttatttttctaaatgttgaaaatcataaactgcttaataataaagaacgagatttaagtaatagtgctccattaatttataagacattaagtgcgctgtatcacaactttgatggctttggattaaacatttttgataatcatcatacatttaatgcgatgcatctatatgataaaaatggatttaaaacaacactaggtcttatattggaaaaatttatcgaatatgtctcgaaaccaaaatacgaaaacagttattattctatttttgatatagagaattattattgtcttgttatttatgattggcgagtgatagagagcgagacaattatgagtaattttgaggatagtcaagtttatataaattttaaaaacaatgttttaaacgataaatatctaattgtaatagaaacattggacgaaaatagtggcaacattaatcatttgatttctaaagaattaagagataaatatgaatggaaccctagtttactatctaaaattgacaactaccttaaaccagcaatagagattaaagagcataattttagtgataattctttgaatattaacgttacttttaatgcgttatacataattaaaataggaaaaaaataacaccttgatatgtattgcaaaatttaatttgcatttgttggtaattttgacaacgtattaaaaacaaatgagaaagacaatggcaaaaaaatttaagataataatgacagaagcattgtctttatatatttgggggtgcaacattttgaatactgagaaattagaaacattgcttggcttctataaacaatataaagcattatctgaatatattgataaaaaatataagttgtcgctaaatgatttagcagtcttagatttaacgatgaagcattgcaaagatgaaaaagtacttatgcaatcatttttaaaaactgcaatggatgagctagatttaagtaggacaaaattattagtttctataagaagactaattgaaaaagaaagacttagtaaagttagatcatctaaagatgagcgtaaaatttatatttatttaaataatgatgatatatctaaatttaatgctttatttgaagatgtagaacaatttttaaatatttaattgaaattgagtgtcgaaagcatagaatttgcttatcggcacatttttaatttatacatattttaaaactaagtaacagtttgaaggaatcgtagttcaataatgttaattgtgaaaatgtatataaacataaaaaaatcatgtataatatatgttgttaattaaacagttcgaaagcgagatgacattatgggacgtaaatggaataacattaaagaaaaaaaggcccaaaaagataaaaacacaagtagaatatatgcgaaatttggtaaggagatttatgttgcagcaaaatctggtgaacccaatccagaatctaaccaagctttaaggttggtgcttgaacgcgctaagacatattcagtgccgaatcatattattgaaaaagcaatagataaagctaagggtgctggagacgaaaactttgatcacctaagatatgaaggatttggcccaagcggatcaatgctaattgttgatgcgttaacaaataatgtaaatcgtactgcctctgatgtgcgagctgcttttggtaaaaatggcggtaatatgggtgtatctggatcagttgcttatatgtttgatcatgtggcaacatttggtattgaaggaaagtctgttgacgaaatacttgaaacattaatggaacaagatgtagatgtaaatgatgtgattgacgataatggattgacaatagtctatgctgaaccagatcaatttgcagtcgttcaagatgcgcttcgtgcagcaggtgttgaagaatttaaagttgctgaatttgaaatgttacctcaaacagatattgaactttctgaagcggaccaagtaacatttgaaaaattaatcgatgcattagaagatttagaagatgtacaaaacgtattccataatgtggatttgaaataatgaaatcagcagaacaatggattgatgaattgcaacttgaatcacatcctgaaggtggtttctatagagagacaattcgagaagtattgaaagatggacgcagagcgccgtttagtagtatttattttttacttacagatgacaatatttcgcattttcatcgaattgatgctgatgaagtatggtactatcatgctggcgattctctaacaattcatatgataaatccggatggggaatatacgactgcaacattgggtactgatatccaaaatggagatgtattgcaatatgtagtgcctaaaggaacaatttttgcttcttcaatcgaattttcaaatacttatagtttagtaggttgtatgtgtcaaccggcatttgagtttaagcagtttgaattgtttaagcaatctgaattaattacacaatatccgcatcttaaatcagtgattgaaaaatatgctttaaaataaaaatgatcaatgaagtggtttgaaggttgttaataaacctttgagtcacttcatttttgtatgtattcttgattgaatcagaatagaattgatgctacagctgtttttaatgaaaatagcattaaatgattttgaaaacgataagagtgtgttatttatatttttgaaaaatcacttttatgaagaaatgtgtgtactatctaattaatattgtctattttaagtaaattgaagcgagttgtagtaaaataataataaatattttcatatgattaacaaaaactataaaactgtatcatgacatgacatcatttatgtagttttatataataatgacaaggagttggtgactgtgaaagtaaagtatatagataaacgtcactggcgtcgcctaattgatagggaatacacagaggtaaaagttaataataataggtttaagggtattataggcttagtcacgatgaaaaaggttcgtgatcctttagaggtgacggtagttggacaaaatatcattgtcgcagatgacaattataaatggttgcaaatactacctgaaaagaaacgttatagtataactgtaatgtttgataataaaggcaatccattagaatattattttgatataaatatcaaaaatataacgcaaaaaggtaatgcgcgtacagtagatttatgtttagatgttttagcgttaccaagtggtgaatatgagttggtagatgaagatgacttaatgtttgcattagaaagtgagcaaattacaaaaaagcaatttcatgaagcatatatgattgcacatcaaattatggcagagttagaaaatgattttaaaggattccaaaagaaaatcatgtactgctttaataaaattaatgcaaaggctcaaaaaaatcatcaaaagccacaaaataaaactaatattgaaaaaagcaaacaaataaagcctaagcaatataatcaaactaaaaatcaccaacaacaaaagaaaaactaagtaattcaagctgcagccatgccaataaaattggtgaaattattcgttagtaatgaactcttgaatgctcgtagtcatgaaagttcaataattgaataatttatggggggaaattatgaagattgaagactatcgtttactaataacattagacgaaacgaaaacgttacgtaaagcggctgaaattttatatatatctcaacctgctgttacacaaagactaaaagctattgaaaatgcttttggagtagatatttttatcagaacaaaaaaacaattgattacaacaactgaaggaacaatgattattgagcatgcccgtgacatgttgaaaagagagcgattattttttgacaaaatgcaggcacatattggtgaagtgaatggaacaatatcaatcgggtgttcttctttgattggacaaaccttacttcctgaagttttgagcctatataatgcccaatttcctaatgttgaaatacaagtgcaagttggttcaactgaacaaattaaagcaaatcatagagattatcatgttatgataactcgtggaaataaagtaatgaatttagctaacacacatttatttaatgatgatcattattttatttttccaaaaaatagacgagatgatgttacaaagttaccatttatagagtttcaagctgatccgatttatataaatcaaataaaacaatggtataacgataatttagaacaagattaccatgcaactattacagtggatcaagtagcaacttgcaaagaaatgttgattagtggtgtaggtgttacaattttgccggaaattatgatgaaaaatatcagcaaagaacaatttgagtttgaaaaagtagaaattgataatgaaccgctgattcgttcgacatttatgagttatgatccgagcatgttgcaattgccacaagttgattcttttgtaaatctcatggcgagctttgttgaacaaccaaaggcgtagttttagactaatttaaggtttgtatttagttttaaactattcggttaaattgaacgtagttggttgctaatgcaccaacagcaaaagagcccctaattaataaattaaaaggggacaaaggaacgcagttgattgctaatgcaccaacagcaaaagagcccctaattaataaattaaaaggggacaaaggaatacagttggttgctaacgcaccaactgcataagagcccctaattaataaattaaaaggggctctaagaagcggggttatggatatgtttgcagcgttattacaaataaagaattataaactctttgttgctaatatgtttctactaggtatgggtattgcggttacggtcccatatcttgttctttttgcaactaaagatttaggtatgacaacaaatcagtatggattacttctagcatctgcagcgattagccagtttacagtaaattcaattattgctagattttcggatacgcatcactttaatagaaaaattattattattctcgcattattaatgggtgcgcttggtttttcaatatacttttttgtagatacaatctggttattcatattactatatgcgatttttcaaggattatttgcaccagcaatgccccaactttacgcatctgctagagaatctatcaatgtttcaagctctaaagatagagctcaatttgccaacacagtattacgttcaatgttctcattgggctttttatttggtccatttattggtgcccaattaatcggattaaaaggctatgctggattgtttggtggaacaataagtatcattttatttactttagtacttcaagtgtttttctataaggatttaaacattaaacaccctattagtacgcaacaacatgttgaaaaaattgctcctaatatgtttaaagacaaaacacttttattaccatttattgcatttattttattacacattggacaatggatgtatacgatgaatatgcctttatttgttactgattatttaaaagaaaatgagcaacatgtcggttatttagctagtttatgtgctggtttagaagtgccatttatgatcattcttggcgttttatcatctagattacagactcgaacattgttgatttatggagcgatttttggtggtttattctacttcagcattggggtatttaaaaacttctatatgatgttagcaggacaggtgtttttagctattttcttagcggttcttttaggaattggtattagttatttccaagatatcttaccagattttccaggatacgcctcaacactattttctaatgcaatggttattggacagttaggcggtaacctattaggtggtgctatgagtcactgggtaggtttggaaaatgtattttttgtatcagcagcatcaatcatgttaggtatgatacttatattctttactaaaaatcaaaaaattacaaaagaggatgtgatatcaacatgacaattattttatggctacttatcatcgctgccttcatgttagcatttgttgggttgattaagccgattattccttctgttttagtattatgggttggctttttaatctatcaatttggctttcataatcagcatttatcatgggtgttttatgtatctatggcattgctaacaatattaattttatgtgccgactttttagctaataaatattttgtgaatcgcttcggtggttctaagtttggagagtatgcagctttaattggtgtggttattggatgttttgttttaccgccatttggaattattattataccttttattttggtattcatagttgaattaatacaaggctattcatttgaaagagcagttaaagtaagtataggttcaatcgtagcatttttaacaagtagtatagctcaagcaatcattatgtttataatgattgtatggttctttatagatgctttattgattaattaataaaaagcttattgcaaaatatgtttttcggtaactgtaatttagtgattttatcattaacagtaccaaattcgcatatgatgtaataagctttttgtttataaaaatgtatgagaatgttttttcgaaatatttctttcaatgcgtaatccaataggcataactataaatgaaaatataataaatacccaattgcttacctgaatatatggtccaaaggcaagtaatgattgtggaataaagaatacatagaaaaatcctacaattagtagaatgattgctaaataggtgaatatccatatccaatttgaattgttaaaacactgcagttgtattgttttaaaactaaaccatataaataaaaagacaataaagaatccaacgactactgaaaacgggaatgaaacaaaatataaattacttccatttttttccatgaaaaatcctaaaaatcctttgagaaaactaacaatcccaattaatagaacgatgtgttgatagatatatttaaaaatatttttaaatgtttcattaggcatcgcttttagttcttttattgcatgtgcttttgggtcgtgattgaaaaaatctaaggctaataaaccatgttgttctgcgcttaataattgtttaagtatacggttaataattaactctgtatcatgaggattgacgcgaaagtcagagcgcatataagtcatataattctcgaagatttctctatcagtattgcttaatcttaatgatttaacattattttcttttgttaattgcgcagtacttttcattgttacttaagcgctcctttaaaaatgtttaattccaaattaaaatggaaatgattttatagtattaataaggtcaatcatatcatattaaacgcataaatataacgattaatattggagaggaaaatgaggacacttaataaagatgaacataattatatcaagcaaatagctaatatacatgagacattattgtcgcaagtagaatccaactataaatgtactaaactgagtattgctcttaggtacgagatgatatgttcaagattagaacatacaaatgataaaatttatatatatgaaaatgaaggtcaattaatagcgtttatttggggacattttagtaatgaaaaaagtatggttaacattgaactgctatatgttgaaccacaatttcgcaaactgggaatagctacgcaactgaagattgcgcttgaaaaatgggcaaaaactatgaatgcaaagcgaataagcagtacaattcataaaaataatttgccaatgatatctttgaataaagatttaggttatcaagtgagtcatgtgaaaatgtataaagatattgattagaattaggattatgttgctaattcatgttaaaattaaaaaagatttaatgacgttaaggagttttatatgaagaaattaatcatcagtattatggcggtcatgctatttttaacaggttgtggtaaaagtcaagagaaagccactctggaaaaggatatcgataatttacaaaaagaaaataaagaattaaaagataaaaaagaaaagcttcaacaagaaaaagaaaaattagcagataagcaaaaagaccttgaaaaagaagtgaaagatttaaaaccttcaaaagaagataacaaggatgataaaaaagacaaagacaaaaatgaagataaagacaaagataaagaggcatcacaagataagcaatcaaaagatcaaactaagtcatcggataaagataatcacaaaaagcctacatcaacagataaagatcaaaaagctaatgacaaacaccaatcataattgaattgcttacttgttatagatgaaaggtacagcgttttaaaccttattttaagggtatgtattaattaaaatgtggtcatgattgaaatagaacgtaaaaatagacaacgtaattaataaaggagagaaacggcatgcatgaacaagattttagaattttagagggtcaagatattactttgccagaattaggtagagaattagaaaatattacaggacatacgattgctgattctactggcgaaattaagcgtgtaattgcacatttaccaaactttgagtccgatacagatacttttgttgctacatatcgtttaaaccatcaacaagattttatagatgcaacttttactgcgctgaaatcagatagagcacgtttaaaagaagtgccagttcatgttgaacttataagttatatttctaaatcaaaataaactgctatctaaaacgcaaagttgatcaaaatatcgattttgtgttttttattgagaaattatataggagtgtcaatcgatgatttattgtgaaacggagcgtttaatattaagagactggcatgaagatgatctgttaccttttcaaaaaatgaatgcgaattatgacgtacgtaaatactttccaagtttattgagttatcgtcgttcagaattagatatgagaactatggatgcggttattaaagattatggcattggattatttgctgtagaagataaagagacacatcaatggataggctttataggtttgaattatattccagaaacaagcgattatccatttaaagaattaccgctttatgaaataggttggcgcttgttgccagaattttggggaaaaggattagcaactgaaggcgcaaaggcaacgttgaagttagcagaagaacatcaaatatacgatgtctatagttttacagcagaagcaaataaagcttcacaacgtgtaatggaaaaaattggcatgacagtgtatgatcatttcgaattacccaatctaagtaagtatcatttattaaaaaggcaagtgcgctattacattaatcttcgaaagtgaaaaatttatacataagcgtaacaaacacccctaacattgtttagctgatgataacaatattaggggtgtttatttattttttaaccttagaatgattaatcgtatgaacgagtacccagaggtttgaaatttaatattgattcaattaatgattccttagtgtcgcataacggtgcaagagcacgatacttaggatcaataaaaccttcctcaatcatatggtcaatcattgtttgtagtggattgaaaaagccattaatattataaatggcaataggcttttcatggatacctatttgagcccaactatacatttcgaaaaattcttctagtgaacctgcgccaccaggagccatgacaaatgcatctgcaagttctgccattttatttttacgttcatgcatagaatcaactaaaattaattcagttaaacgttggcttgtgatttcatgttcatctaacattttaggcatgacgccaatagctttgccgccatgatctaatacaccatcttgaatggcacccataatgccaattgaccctgcaccaaatactaattcataaccttgttcagcaaaatatttacctaaatcgtatgctttttgtacatatgaagggtcatgacctttgcttgcaccacaataaactgcgattcgtttcatgttaatccagctccttaattcgatgaatgacttttaatagtgattgttcaaacactttttgatcttgctttgtaaaaggtgggggacctttgtggcgaccaccttgttttctaatttgtgcattcatatatcgtttatctaatagttgttgaatatttttggaattgtatatcttcccattatgatgcatgacaattaagactttgtcgactaataaacttgcgagtccataatcttgagtgactacgatatcatccttcgttgataattgaacaattttgtaatcaactgcatctggtccatcatcaacatataatgttgatacatgtggaggatataattggttcgaaaaatggctgaagctccgaataattgtcacaaaaatgcctgtctcagttgttaaatctataatagaatcaacaacaggacaagcatctccatcaataataatatgtgtcacaattatgcctctgtattgttttctttattttgttgagaggcgcttttggcaacataatctttatattttttaaatgacttgatgcgtgctttatcaccttcttgttggcgtttttgttcttctttgtgtcgtttttcaatatttttttgtaactttttattcattttagcgatttctttgcgatttttttcagctagtttatcgccttttttctcagttttctcatctaatttattaggtgttaagcctgctttttcttcgtatttttgtgattttttcatatctttaatacgttgtatttcattcttttcgcgggctttttgctcttctttatgacgcttttcgatatttttttgaagtattttattcattttattagcgtctttacgattttgtttagctaatttttcgccttttttctcaatataggcaggatcatgttctctagcaaactttttaagttcacgtttattttcaaaatcttgttttttatcgccgacatattctttaacatcactcgctgtgttactgattgctgcagatgtttttgaagcaactttacttgtagcatctgtaactttttgtacgtccggatgttgtttgatacgtttacgttcaacaattaacggtaccaatacaattggtaatacattaatcataaatttgatgacttttttcttatccatagatcttgcctccataattactttattaattttacataccctatgatacatcaatataaacgatgatagtagtgaatcactattaagtatttcagatgttttttaaaagaagacaataaaaactgccaatcaagtgattccttaattgacagtctatattttaaaaggaaattaaatacctttaccaatgccaaatccgaagtaaagtatagcaataaagattactaatacaattctgtaaatggcaaatggaattagtttgattttgttaattagatgcaagaatgttttgattgcaattagtccaacagtaaatgcagctaaaaagcctaaaatataaaaaggtatatcagcaatctgaatatcttgataatgttttaataaagataaaccactagctgctaacataattggaacagccataataaatgtaaagtccgatgctgctttatgatttaatttcattaataccccagttgaaattgttgagcctgaacggctgaaaccaggccacatagctactgcttgagagataccaattacaaatgcttggaaataactgatttgatctactgtttgtgggtttttaactttagctgagtatttatcagcaataatcatatagatagcacctacgaataagccaatcataacagttggcacactaaataaatgttcttcgatgaaatcatcaaatagtaagcctaaaatacctgctggcaccatacccactaatacatgtaataaatttaaacgtcttggctttgaacgtctttgttgatcgttatctccttcaacatgtttgtgtttaccaatatgtaaaatctctaagaagcgttcgcggaacacccatgctgctgcaaagacggatcctaattggatgacgattttaaatgtaaatgctgactgagaacctaaaaattcagatgattttaaccacatatcatcaactaggatcatatgtccagtagaggaaacaggtgcaaattctgttaatccttcgacgacccctaagataataccttttattaattcaatgataaacataatgtacccactttcattactcaatttaatttatttaaatatcaaaattaccatatcatgatagcatattcatttaaagacatgctagttatagttataatactagactaaagatgtatatattcattttcttttacatgtaaaactacaatattttattgagctatttaatttgattttaaggaaaaccttttataataggtttaggtgatataattgtgaaaaaattaacaacgatactgtttcaatataaaatttttccggtactcatgttcttggtcagtactggtctcggcatactcgttataacgcaaaatattttaatagcagattttttagctaaaattataagacatcaatttcaaggtttatggattgtattatttattttattaggtgttttatttttaagagcaactgtgcaatttctaaatcaatggttaggtgatacattagcatttaaagttaagcatatgcttagacagcgggttatttataaaaataatggtcatccaatcggtgaacaaatgactatactcacagaaaacattgatggtctagcacctttttataagagttatttgcctcaagtgttcaaatcaatgatggttccgctcatcataatcattgcaatgtttttcatccatttcaataccgcattaattatgttaataactgcaccatttattcctttgttttatattattttcggtttgaaaacccgagatgagtcaaaagatcaaatgacttatttgaatcaatttagtcaacggtttttaaatattgctaaaggtttagtgacgttaaagctatttaatcgtacagagcaaacagagaagcatatttacgacgatagtactcagtttagaactttaacaatgcgcattttacgcagtgcttttttatcgggtttaatgctcgaatttataagtatgttaggtattggattggttgcattggaagcaacgctaagcttagtagtatttcataatattgattttaaaactgcggcaattgcgattattttagcgcctgaattttataatgcaattaaggacttagggcaagcgttccatactggaaaacaaagtgaaggtgccagtgacgttgtgtttgagtttttagaacaaccgaacaataataatgaatttctattaaagtatgaggaaaatcaaaagccatttattcagttaacagacatatcatttcgatatgataattctgatagattggtattaaatgatttaaatttggaaatatataatggtgatcaaattgcacttgtaggtccaagcggggcaggtaaatccactttgacacatctaattgcaggtgtttatcagccaacaataggtactataagtacaaaccagcgtgatttaaatataggaatacttagtcaacagccatatattttcagtgcttctataaaagagaatattacgatgtttaaagatatagaaaataatactattgaagaagtgctagacgaagtaggtttattagacaaagtgcaatctttcacaaaaggcattaacacaataataggtgaaggaggcgaaatgttatctggtggacagatgagacgcatagaactttgccgtcttttagttatgaagccagatctcgttatatttgatgagcctgcaactggtttagatattcaaacagaacacatgattcagaacgttctgtttcaacattttaaagatacaacgatgattgtcattgcacatagagataatacaattcgccatttacaacgacgtttgtatatagaaaatggaagactgattgctgatgatcgcaatatttcagtaaatataacagaaaatggtgatgacttatgaaaacacgactaaaatttcaagtagataaggatttattgttagctatagttgttggtgtttgtggaagtttagttgcgctcgccatgtttttcttaagtggttatatggtgacacaaagtgcacttggtgcgccactatacgctctgatgattttagtcgttacagtaaaattgtttgggtttttaagagctattactcgatacgtagagcgccttatttctcataaagctacatttacaatgctacgtgatattcgggtacagtttttcggtaaattagtaaatgtcattcctaatgtttaccgtaaactgagttctagtgatttaatttcacgtatgattagtcgtgttgaggcattacaaaatatatatttacgtgtttattatccaccagtcgtcatcggtttgacagcgctagttacagtaatagtattggcgttcatttcaatcggccatgcgctattgattatggttagcatgttgtttactttactcattgttccttggttaagctcaaaaaaagcacgtactttaaagaaacatgcagctaatgaacaggcccgatttttaaatcatttttatgattataaagctggtatggatgaactacgtcgatttaatcaaattaatcattatcgagataatttgatggctaaattaaatcattttgataaattacaacttaaagagcaacgctttttaacgatttatgattttatattaaatattattgctatgctttcgatttttggtagtttagttctaggattaattcaaattaatgcaggccaactaaatattatttatatgacgagtatagttttaatggtcttaactttatttgaacaagctgtaccaatgacaaatgtcgcgtattataaagcggatactgaccaagcattgcatgatattaatgaagtgatatctgtaccttctactaatggaaaaaaccgtcttaatgataagtatgatgcaacgaacatttatgaagttaaggacgctagttttaagtattggaaccagcaaacgtatgtgttgtcggatattaattttaatgttaatagaggcgaaaagattgcgattgtggggccttctggttcaggaaaaagtacattactacaaattatggctgggttatatcaattagatagtggctctattcgtttcgaaaatatggatatgtttgaaatagatgacaaagataagtttgaatcgttaaatgtcttgctacaatctcaacaattatttgatggtacaatacgtcaaaatttatttaccgatgaaaaagatgaagcggtgcaagcaatatttaagcaattagatttagaacatttggcactagaacgtcaaattgacttagatggtcatacattatctggcggagaaattcagcgtttagcgattgcaaggatgttattaaaagatactgcatcaacatggattttagatgaaccaacaactgcattagataaacaaaatagtttaaaagttatggatttaattgaagcacatgcagaaacattaattgttgctacacacgatttaactttattgtcacgttttgagaccatcattgtgatgataaatggtaaaatagttgaaaagggaaactatcaacaattactcgctaatcaaggtgctttatggaatatgattcaatataatgcataaaaaaactgcttgataggctaagaaacctttcaagcagttttttaactaacaagcttacgcgtgctaattgtttttctattcttaataaattctaaacattactttaattgtcatgacaaaagttaattatttttcctttgtttcatcaaatgcatgaatgactttacctaataagcgattaagttctttaacttcatcttgagataaagaagaagctgaagcgactttgtcagatgcattacttaattctggtctaatagtttcacttttgtcagtcaagtgaataaatacttcacgttgatcgacttcggaacgttcacgcttaattaagtctacttgttccattcgttttaataatggtgatactgtaccagtatcgagtgctaattcagttacgactttcttgacgtttacaggagattcatcccataaaattgttaagacaagaaattgtgggtatgttagattgtacttcttaaaaactttgttagagtagtagcgattaacttgtctttgagcattgtacaaactaaagcatagctgttcttttaaattatgttgatcagacattaaagttctcctccagacatactatccgtttttttctcttttcggattggtaatcattaaaaagttgattgtttattaattcacaactttctttgattcaatgccatgctaaaattaaagtatgtttaaagtttagaagatatttttgattaaatcaagcaaaaagataatttaatatatatgttatcatttttaaaaataactgtaatagaaaagagaatataaaatgaaaaataataaagatgaaaaaataagaatatccataattaacggatttttgggtagtggtaaaaccacgttactgacacattatattagtgaattattaaaaaatgatgagaaaattaaaatcatcatgaatgaattcggtacttttgatattgatagcaatagtatttcaaatgaaattgaagtccattcattgattaatggttgtgtttgttgcgatcttaaacaagaacttgtctatgaactaaaagccattgctttaaaaggggacgttaatcatgtcatcatagaagcgacaggcattgcgcatcctttggaattactagttgcatgtcaagatccgcaaatcgttaatttctttgaaaagccgattatttatggtgtattagatgcgactcgatttttagaacgttatcaatataccgaaaatacagtttcgctgatggaagatcagttgaaactaagtgacatgattattattaataaaattgatcttataactgatgacagtcttgagaaaattgataagcaattaggtatgatttgtgcaagtattccaacttataaaacaacctatggaaaagtttcgttggaagaattggacttaactgttaaagacagagagatatcgtctcatcatcaccatcatcatgggattaaaagtatgacttacacgtttacaggtccgattgatcgtcaattgttttatcaatttataatgaaattaccggaatctgttctacgtttgaaaggttatgtgtcatttagagatcaaccaaatgcaatttatgaatttcaatatgcatatggtttaccagactatggaataattgacatgcaattaccattaacgattgttattattggtgaaactttagatacaaatcacatacgtaatcaattggatatgctacaatttacgtaaatcagaaaatgtgttgtttcaatttaacggaaatagcacattaatttcttaatacttttattgtgaatattttgtgacattgagggatggagtggatgagatatggaacaaataatgattaatcactatgttcatttttctaggcttgtacaaggtttttggcgtgcaaatgaatggaagatgactgcgaaagagttaaattattttataaatgaattagttgaacgtggaattacaacgatggatcatgctgatatttatggggattatcaatgtgaatcactgtttggtaatgctttggatttatcacccgaattaagaaataaaattcaaattgttacgaaatgtggtatcattttgccttctaagcaatttgattttacaaatggacatcgttatgatttgagtagtaagcacatcgtgaaatctgttgaacagtcattaatcaatttgaatgtagattatttagatagtctactcattcatcgtccttcaccattgatggatccagaacaagttgctgatgcattaactaaacttgttaaacaaggtaagttgaagtcattcggggtgtcgaattttaatcattcacaataccaattgttaaatcaatatattatgaaagaaagactacatattagcatcaatcaattagaattatcgccatatcacgttgatagtttacaagatggaacaatggattcaatgtatcaaaaccatgttcaaattatggcttggagtccttttgcaggcggtaaaattttcgacaaggaagatattaaagcgcaacgtattatgaaagttgttcaatcaatagctgacaaatatggtgtgagtgacacagctgtgatgatagcatggttagtaaaaataccgcatcgtatcatgccgatacttggaacaagtcagttaaagcgtattgatcaagcaatcgaagggctacaacttaatttagatgatcagtcgtggtttgacatttacaccgctattatcggacaagatattccgtaaacttatttacttttaaatcataaaggagcatatcatgacaaacgaagataaacgtttcgaacaattaagatttgaacgcaaatttatagttattccgtatttaatttatgcagtcattgtattactattaaatattttctattctgatttgaaaataacaatgacattattcggacttttctttgcgtataatgtagtcattttgttcatagcatttattaaacattataaacgcacattgttactaagtcttatattaacagtgcttagtggcgcggcattctttggaattatttatgtttatggcattaatcatttttaaacattaaaaagagactatctacaataatctcatttgcattttatctaactaagtttaacttttgcttagaaaaatgatgctatgaggatattcagtagatagtttttttatgatctaatatttaaacttagatatcgttttgtaattaaccgagataactcatcacctagcaatattatttacaaaatatttcgataaaattgtgtattttgcataaattaaaaatgtatgttttaaaaaattgttataattaaattaagattaaacaaaggggtgactgttatgtcagaagaaaaacatgtagttgaacatgaacaacaaaagaaagaaaagacaaaaaagcaatacaagacattttggattgtcatgagttttataatacttatagttgtactattactcccggcaccttcaagtctgccgataatggctaaggcagtactagctattttagcttttgcagttattatgtgggtaacggaagctgtatcatatccggtgtcagcaactttaattattggcttaatgatattacttttaggatttagcccggttcaaaatttaggggagaagctaggtaatccgaaaagtggcagtgctgttttagctggaagtgaccttctaggaactaatcatgcattatcattagcgtttagtggatttgcaacttcagctgtagctctcgttgcagccgcattatttttggctgctgctatgcaagaaacgaatttgcataaaagactagctcttttagtgttatcaattgttggtaataaaactagaaatatagttattggagcaattatcgtttcaattgtacttgcatttttcgttccttctgcaacagctagagcaggggcagttgtaccaatcttgctgggtatgattgcggcatttaaagtttccaaagatagcaagttagcgtctttattaataattacttcggtacaagctgtgtcaatttggaatattggtatcaaaacggcggcagcacaaaatatcgtagcgattaattttataaaccatcaattaggatttgatgtttcatggggcgagtggttcttatatgcagcgccttggtccatagttatgtctatagctttatatttcatcatgattaaagtgatgcctcccgaaattaatacaatagagggtggcaaagatttaataaaagaagaattgcataaacttggccccgttagcgcacgtgaatggcgtttaattgttatatcgatgttattattactgttttggtcaactgaaaaagtattacatccgattgactctgcatccattactattattgctttaggtgttatgttaatgccgaaaattggtgtcatgacatggaaacatgttgaaaataaaataccatggggaacaattatcgtgtttggtgtaggtatttcactaggtaacgttcttttgaaaacaggtgcagctcaatggttaagtgatcaaacttttggtgttttaggtttaaaacatttacctattatcgcgacaattgcacttatcacgctttttaatatattgattcatttgggctttgcgagtgcaacaagtttatcatcagcgttaatacctgtttttatttcgctaacctctacgttacacttaggagaccagtctataggatttgttttaattcaacaatttgttattagttttggtttcttattacctgttagtgcacctcaaaatatgttggcttatggcactggtacttttacggttaaagatttcttgaaggcaggtataccattgacaattgtagggtatattctagtgatagtttttagcatgacttattggaaatggttaggtttgctttaattaaaaatataaataagaatctaggttattttaaagtgacaaaaagcttaataaaataaaaagataattgaagggtgttttgtttatggcaattgctgtgttattaaatcgaatgtttcgaatggaacacaatccattatttgaatatatttatcaacaaaaagaagacattgatgcatgttattttatcattccggaagaggacatgtcttcagcttctgatttgaaagcacagttttatcgcggtactttgcagcgcttttaccaatcgttgcacgcagaaaagcttacaccttatgttatgtcttatgacgatatcatttcattttgtaaagaaaacaatatctctgaagtagtgactgcgggtgatattatgagttatcattttgaagagtatgatattttacatcaacgttctttattcaatgaagcacgcattgccgttactttgatacgtgggaatcattactttaaagcgagtaaaacaatgaatcaacaaggggagccatacaaagtttttactagtttctataaaaaatggcgaccttacttgaggcatagagacgtatatcactatgatttaaaatcattcgaagacttcgtcattgcatcacctgatgatttagtgtttgatgacatagcatttggatcctcacaaataattgaacagaataaatggcaacattttttagatcaagatatacagaattacgaaagcggaagagactatttacctgaagtattaacaagtcagctaagtgttgctttagcatatggattattagatattattgaaatttttaatgatttattggcgcgttatgatgaagatgaggcaaactatgaagcatttatacgtgaactcatttttagagaattttattatgtgttaatgacacagtatcctgaaacctcataccaagctttcaaacctaaatatcgacagataaaatggtcgcaaaatgaagcgaattttaatgcatggtgcgaagggcaaacaggatttccaatcattgatgcagcaataatggaattgacacaaactggttttatgcataatcgaatgagaatggttgtgtcgcaatttttaaccaaagatttatttatagattggacatggggagaaaaattctttagaaagcaccttattgactatgatgcagcatcaaatattcatggatggcaatggtctgcttctacaggtacggatgcagtgccgtattttagaatgtttaatccaataagacagagtgaacgctttgatgctaaagctttgtatatcaaaacatatcttccgatttttaatcaaattgatgcaaaatatttgcatgatacgcaacgcaatgagtccaacctttttgaacaggggattgaattaggtcgtcattatccaaaacaaatagtggatcatcaagaaaagagatctcaagttttagcgacatttaaagcattagactaattcgtctcaattgatagatcaggcatgagtaaaatctggagcagaatataaagttcttaagcaatataaataagccaatttctattattgatgtgatagaaattggctttcctcaaatatataagttgtatttagttttcttattaatttgatgttatcttagtatgtccgtaaataaagtgaggtatagtacgacatactctaaaaacgtagtgagataaatatatttcaatctaacttttatgttttgaggcacttgccatttaggatattgtcgttcgtaatacgacacttgttgtataaatacacctagtccaaatggcagcatcatgagtaagatacttcttaaataacttaaaccaatatcatgccatatgtgtccaataatcaattgaaagccaatgatagatactattaaaacgattatatttattgtcacttgttcaaacgcactccttttccaaataatagaattgctacttgcatgacaaccataaaacatacaaacatagcagttttaagcgttagactttctagaatgtgatttaaaacatgtaagggctcattaaagaaataaacggaatgtaagcgtaagaaacgaccaatataaattccgaatccatttaaaaacattagcacgacaacaattaatctattaagccaacggtgagaagtcaatgttagtatttcaaaatagattaaaatcatcacataaaccgctaagaagacaccaagcagtaaataggtaaagtatttccactcacttaaatttagtcctgcgtaaaagttgaattgaaattggttcaaatggattaaatcagttaccatataaaatgtatttggtaaaagtaacacaaatataaaactatatatgataaatagtggccattcatactttttattcggtttgaataatcgtaataatagactaagctcaaaaggtatatatgctaaaaacaaatttaaagtcataaattgaaaaattttagtctcaaaaagtgagacgataaataaaattaaaaagtaaattctagcgatgtatcgagattgcatcaataataaacactactttctaatgaaaaagttattcattcaaatgtgatagttataaacgcattcaattcctaattaaaaatttaatttaactcgttgaagtatattaataaacgagaatgcatttatgattaagcacttatgataacttgtaataaaatttgattcaactaaaaagtaaagtgctattgaggatcaagtaaatttaaaccgactgcatctttgaatgaacgttgaatgtccaaatcagttacagtaagaatgatttcagcagttgcagaaacaattgctttagcgagatgtccgctaaaagtttcatatgattgagtaccgaaagtagcatgcaaatgtgcaaaatgaccattgtctagatgagaaatattacctaataagctcgtcaattccagtggctcagtaatatgtttttcttcgtattgtttcgttgttaaattgaaaaattttaatacaacgtcatcacatgcaccaatgccgctgacagatgtaaatgttaagtcttggtcatctgcaaaggttgttatacattcaacgatatcttctcctttttccaacactagtagtatagtatgattacttttttgcaatttcatatgatcaatcccctttattttaatatgtcattaattatacaattaaatggaaaatagtgataattacaaagaaaaaatattgtcaaatgtagcaatgttgtaatacaatatagaaactttttacgaatatttagcatgaattgcaatctgtcgtggaaaagaagaataacagctttaagcatgacatggagaaaaaagaggtgagcatatgaataaacagatttttgtcttatattttaatattttcttgatttttttaggtatcggtttagtaataccagtcttgcctgtttatttaaaagatttgggattaactggtagtgatttaggattactagttgctgcttttgcgttatctcaaatgattatatcgccgtttggtggtacgctagctgacaaattagggaagaaattaattatatgtataggattaattttgttttcagtgtcagaatttatgtttgcagttggccacaatttttcggtattgatgttatcgagagtgattggtggtatgagtgctggtatggtaatgcctggtgtgacaggtttaatagctgacatttcaccaagccatcaaaaagcaaaaaactttggctacatgtcagcgattatcaattctggattcattttaggaccagggattggtggatttatggcagaagtttcacatcgtatgccattttactttgcaggagcattaggtattctagcatttataatgtcaattgtattgattcacgatccgaaaaagtctacgacaagtggtttccaaaagttagagccacaattgctaacgaaaattaactggaaagtgtttattacaccagttattttaacacttgtattatcgtttggtttatctgcatttgaaacattgtattcactatacacagctgacaaggtaaattattcacctaaagatatttcgattgctattacgggtggcggtatatttggggcacttttccaaatctatttcttcgataaatttatgaagtatttctcagagttaacatttatagcttggtcattattatattcagttgttgtcttaatattattagtttttgctaatggctattggtcaataatgttaatcagttttgttgtcttcataggttttgatatgatacgaccagccattacaaattatttttctaatattgctggagaaaggcaaggctttgcaggcggattgaactcgacattcactagtatgggtaatttcataggtcctttaatcgcaggtgcgttatttgatgtacacattgaagcaccaatttatatggctataggtgtttcattagcaggtgttgttattgttttaattgaaaagcaacatagagcaaaattgaaagaacaaaatatgtagcataagtattttggtgtatattgatataaagtaaagcgtaatattatgaatgattagcatcgtttttcttatgaattttattaagaaaattcgatgctttacatttaaaaagattcgattgactaaatgttttactctttatatttaaatgttatatgtaacaaaaaatgattttgagtaataaacatgttacaaatattacattctttttaaattgcaatccacatacctaattcattaacgttaatgtgttaagatgataaaaaatgagtaaggaaatgtgggtaaggggatgacagtaaaaaatttatttttaggctttgttgctgtaatattaaccgtttgtttaattggtttattaatattagcaacaaatgaagatgcgcttgctaaggtacataaaacaattaatacgcttaacgcgataaatgtatcaactgaagatacttataaaaagaaaatggatattctcaatattcatactgctaaagcatctgaagtgaatgaaaatgtgaaaaagcaaaatcattttaaacatcgtgtgaatgcaaataaatcaaattcttttaacgaacaagagtgccaagttattgctgatcgttatgcagataagcatatcaatgataattatggtttagaaagaatttctaagacaaatcatggatataattatgtgtattccaatgataattcaactagtaagcaacatgtaagtatttcaaatcaaggcataataacgaaataatagatggaacagtgtattctaattggatatactgtttttattttgcaataatttaatttaaaaaggtgaattcaacttataaaatgatgtaaatgttatgtcaaaatcaaccaatccgtaatgtattttaaaatgttaatatagttctgaagaagtataaatgaggtgttgaaatggctaaaaataagaaaacgaacgcgatgcgtatgcttgatcgtgcaaaaattaaatacgaagttcatagctttgaggtaccagaagaacatttatctggtcaagaagtcgcagaactcatacaagcaaatgttaaaacagtatttaaaacgcttgttctagaaaatacaaaacatgaacattttgtatttgttatcccagtaagtgaaactttagatatgaaaaaggcagctgctttggttggagagaagaaattgcagcttatgcctttagataatttgaaaaatgtaacggggtacattcgtggtgggtgttcgcctgttggtatgaaaacattgtttccaacagtcgttgacaaatcgtgtgaaaattatagtcatatcagtgtgagtggtgggcttcgaacaatgcaaatcacaatagctgttgaggatttgattacaataactaaaggcaaaattggagcagttatccatgaatgattaataacaacaaaaagtatggggcaagattaggagtgtgacagagatgaaatttttataaaattcatttctgccacactcctttttgattgaattagcattttacgatcataaacagtcattataattgagtatttgaacataaaaatgtaattttatcttcacaatttgagtgtttgtgattgtttttggtaatttatgattgaaaagtgaaagcgtactcattataatacagagtgagatggggtgatgatgataattacagaaaaaagacacgagttaattttagaagaactttcgcacaaagattttttgactttacaagaattaatagatcgaactgggtgcagtgcttcaacaatacgaagagatttatctaaactacaacaattagggaaattgcaacgtgtgcatggtggtgcaatgttaaaagaaaatcgtatggttgaggcgaatttaactgaaaaattagcaacgaatcttgatgaaaagaaaatgattgctaaaatagcagctaatcaaatcaacgataatgaatgcttatttatcgatgctggttcatctacattggagctaattaaatatattcaagcgaaagatatcattgtggtaaccaatggtttaacacatgtagaagctttacttaaaaaaggtattaaaacaattatgctaggtggtcaagttaaagaaaatacacttgctacgattggttctagtgccatggagatattaagacgatattgtttcgataaagcttttatcgggatgaatggattagatattgaacttggattaactactcccgatgagcaagaggcattagttaaacaaacagcaatgtcattagccaatcaatcatttgtacttattgatcattctaagtttaataaagtatattttgctcgtgtacctttgctagaaagtacgacaatcatcacatctgaaaaagcattaaatcaagaatcgttaaaagaataccaacaaaagtatcactttataggagggactttatgatttatacagtgactttcaatccttcaattgactatgtcatttttacgaatgattttaaaattgatggtttgaacagagcaacagcaacatataaattcgctggggggaaaggtattaatgtctcgcgcgtcttaaagacattggatgttgagtcaactgccttgggatttgcaggtggatttcctggagaattcattatagatacattaaataacagtgcaattcaatcgaattttattgaagttgatgaagatacacgtattaatgtgaaattaaaaacaggacaagaaacagaaatcaatgcaccgggtcctcatataacgtcaacacaatttgaacaactgttacaacaaattaaaaatacaacaagcaaagatatagttattgttgctggaagtgtaccaagtagtattccaagcgatgcgtatgcgcaaattgcacaaattacagcacagacaggtgctaaattagtagtcgacgctgaaaaagaattggctgaaagcgttttaccatatcacccactatttattaaacctaataaagatgaattagaagtgatgtttaatacaacagtgaactcagacgcagatgttattaaatatggtcgtttgttagttgataaaggtgcgcaatctgttattgtctcgcttggcggtgatggtgctatttatattgataaagaaatcagtattaaagcagttaatccacaagggaaagtggttaatacagttggctctggtgatagtacagttgcaggcatggtggctggaattgcttcaggtttaacgattgaaaaagcattccaacaagcagtcgcatgcggtactgccacggcatttgatgaggacttagcaacacgggacgctatagaaaaaataaaatcacaagttacgattagcgtacttgatggggagtgaaaataatgagagtaacagagttattaacaaaagatacgatagcaatggatttaatggcaaatgacaaaaatggtgttattgatgagttagtaaatcaattagacaaagcaggtaaattaagtgatgtcgcgtcatttaaggaagcgattcacaatagagaatcacaaagtacaactggtatcggcgaaggtattgccattccacatgccaaagtggccgcagttaagtcaccagctattgcatttggtaaatctaaagcaggtgtagattatcaaagtttggatatgcaaccagcacacttattctttatgatagcagcgccagaaggtggcgcccaaacacatttagatgctttagctaagttgtctggtattttaatggatgaaaatgtacgtgagaaattattacatgcttcatcacctgaagaagtactagcgattatagatgaggctgatgatgaagtgacaaaagaagaagaggcagaagctgaagcacaacaagttgcaactgcagaacaatcatctaaacaatctaacgagccatatgtgttagcagtaactgcttgtccaacaggtattgcacatacgtacatggcacgtgacgcattgaaaaaacaagcggataagatgggtattaaaattaaagtagaaacgaatggttcaagcggcattaaaaaccatttaactgaacaagatattgaaaatgcaacaggtatcattgttgctgctgatgttcatgttgagacggatcgcttcgatggtaaaaatgtcgtagaagtaccagtagcagatggtattaaacgcccagaagaattaattaataaagcattagatacaagtcgtaaaccttttgttgcccgtgatggtcaaagaaaaggtaactcaaatgacagtcaagaaaaattaagcccaggtaaagcattctataaacacttaatgaacggtgtttctaacatgttgccacttgtaatatctggtggtattttaatggcaattgtatttttatttggagcaaattcatttaatccaaaaagctcagagtacaatgcgtttgcagagcagctttggaacataggtagtaaaagtgcattcgcgttaatcattccaattttatctggattcattgcacgtagtattgcggataaacctggtttcgcttcaggtcttgtaggtggtatgttagcaatttcaggtggttcaggatttattggtggtattattgcaggtttcttagcaggttacttaacacaaggtgttaaagcgatgacacgtaagttaccacaagcattagagggattaaaaccaacattaatttacccactattgacagtaacagctacaggcttattgatgatttatgcctttaatccaccagcatcttggttaaatcatttgttattagatggattaaacaatttatcaggttctaatattgtattattaggtttagttattggcgctatgatggcgattgatatgggcggtccattcaacaaagcggcatatgtttttgcaacaggtgcgttgattgaaggtaatgcagcaccaattacagctgcaatgattggtggtatgattccaccgttagcaattgcgacagcgatgttaatttttagacgtaaatttacaaaagaacaacgtggttcaattatccctaactatgtgatgggtatgtcatttattacagaaggtgcgattccatttgcagctgccgatccattacgtgttattccttcaatgatgattggttcaggtataggtggcgcaattgctttaggcttaggttcacgaattactgcgccacatggtggtattattgtaattgttggtactgatggtgcacacttacttcaaactcttattgcacttctagttggcacattagtttcagcattaatttacggtttaatcaaaccaaagttaactgaaacagaaatcgaagcttcaaaatcaatggacgagtagttttaatgatgtaaaatgattgttagcaaagagcttcatattaagttgtatgttcaatgaatatatgttagttttatatatcgtgttaacggtagcttatacaaagctgtaaaaacactttctattaattcagtttttatgaattgatatgaaagtgtttttatttttagataaatgaatgaagaaatagacaccacaaatgtatagacttttttaatattttgcaaaaagttatgccaaacgaagcagatatagtaaaatatgagtgtcttaaagtgaaaatttataaataaagaagggtttatacgtgtcagaattaattatatataacggcaaagtttatactgaagatggcaaaatcgataatggttacattcatgtgaaagatggacagattgttgcaattggagaagtggatgataaagcagcaattgataatgatacgacaaataaaattcaagtgattgatgctaaaggtcatcatgtattaccaggttttattgatatacatattcatggtggttatggtcaagatgcaatggatgggtcatacgatggcttaaaatatctatccgaaaatttgttgtctgaagggacgacatcatacttggccactacaatgacgcaatcgactgataaaatagataatgcacttacaaatattgctaaatatgaagcggagcaagatgttcacaatgcagcggaaattgtaggtatacatttagaaggaccatttatatctgaaaataaagttggtgctcaacatccgcaatacgttgtacgcccatttatcgataaaattaaacattttcaagagactgctaacggattaataaagattatgacgtttgcacctgaagttgaaggtgcaaaagaagcgcttgaaacgtataaagatgacattattttttcaattggtcatacagtagcaacatacgaagaagcagttgaagctgttgagcgaggagctaaacatgtcacgcatttatataatgcagcgacgccattccaacatagagaaccaggtgtttttggagcagcatggttgaatgatgctctacataccgaaatgattgttgatggcactcattctcatccggcatcggttgcaattgcttaccgtatgaaaggtaatgaacgtttttatttaattaccgatgcaatgcgtgcaaaaggtatgcctgaaggagaatatgatttgggtggacaaaaagtaactgttcaatcgcaacaagcacgtcttgcaaatggtgcgcttgctggtagtattttaaaaatgaatcatgggttacgtaacttaatatcatttacaggtgatacattagatcatttatggcgagtaacaagtttaaatcaagccattgcattaggtatcgatgatagaaaaggtagtattaaagtaaataaggatgcagatcttgttattctagatgatgatatgaatgtaaaatctacaataaaacaaggcaaggttcacacatttagctaataaataatcataattaaatgtatgcaatagatttaatctgttaacataagcactttatattatgataaaatagaagtaataacatttttttctgggggtgtctaaatgggaaggcgataacatgtagttgtaatttaagtcatagtgataaatttgaatgcgtgttacccatgagtgacacatataacatggaggtgaatccctagaaatagggaattaattggaaacttcgaccataattagtttgattatatttattctattaattgcattaaccactgtatttgttggttcagaatttgcattagtaaaaattagagcaacaagaattgaacagctagcagatgaaggaaataaacctgctaaaatagtaaaaaagatgattgctaatctagattattatctttctgcttgtcagttaggtataacagtaacatctttagggttaggttggcttggtgaaccaacgtttgaaaagctattacacccaatatttgaagcaatcaatttaccaactgcattaacgacgacgatttcgtttgcagtgtcatttataatcgttacgtatttgcatgtagtacttggtgaattagcgcctaaatctatagctattcaacatactgaaaagcttgctttagtatatgcaagaccattgttctatttcggtaacattatgaaaccattgatttggctgatgaatggttctgcacgtgttattattagaatgtttggtgtaaatcctgatgcccaaactgatgcaatgtcagaagaagaaatcaaaattattattaacaatagttataatggtggagaaatcaaccaaactgaattggcatatatgcaaaatatcttttcattcgatgaaagacatgcaaaagatataatggtacctagaactcaaatgattacactaaatgaaccttttaatgtagacgaattactagaaacaataaaagaacatcaatttacgcgttatccaattactgatgatggtgataaagaccacattaaaggatttattaacgtcaaagaatttttaactgaatacgcttctggaaaaacgattaaaatagcaaactatatacatgagttgccaatgatttcagagacaacacgtatcagtgatgcattaattagaatgcaacgtgaacatgtacatatgagtcttattatagatgaatatggtggaacggcaggtattttaacgatggaagatattttagaagaaatcgttggagaaattcgtgatgaatttgatgatgatgaagtgaatgatatcgttaaaattgataataagacattccaagtaaatggcagagtactattggatgatttaactgaagagttcggtatagaatttgatgactctgaggatattgatacgataggtggatggttacaatctcgtaataccaatttacaaaaagatgattacgtggatacaacttatgatcgctgggttgtttcagaaatcgataaccaccaaattatttgggtgatattaaactatgaatttaatgaagcgagacctactatcggacagtctgatgaagatgaaaaatcagaatagatattaatatataaaccaactaagaatgatttaattcatttttggttggttatttttttgactaaaattaatgaaaagtgaaaatagtattggaactcaatatctttaatgatttaatgaataatttttattgaaagcgataattcgtattaattgagtttattgaaaaatttagggtaatgtaaagatataaaagatacatagattggagagatataaagatgttgaatgagatacaaatattaaataatggatacccgatgccttcagttggattaggtgtttataaaatctctgacgaagatatgactaaagttgtaaatgctgcaattgacgcaggctatagagcgtttgatacagcatacttttatgataatgaggcttcactaggacgagcattaaaggataatggcgtcgatagagaagatttgtttataacaacgaagttatggaatgactatcaaggttatgagaaaacattcgaatatttcaacaaatcgattgaaaatttacaaactgattatcttgatttatttctaatacattggccttgtgaagcagatggtctatttttagaaacatataaagctatggaagaactttacgagcaaggtaaggtaaaagcaataggtgtatgtaattttaatgttcatcatctagaaaaattaatggctcaatcaagtatcaaaccaatggtgaatcaaattgaggtacatccatattttaaccaacaagaattacaagaattttgtgatcgtcacgatattaaagtgactgcatggatgcctttgatgagaaatagaggactactagacaaccctgtcattgttaaaattgctgaaaaatatcataaaacaccagcacaagttgtattacgttggcatttagcacacaatagaattattattccaaaatctcagacacctaaacgcattcaagaaaatatagatattttagattttaatttagaattaacagaagtagctgaaattgatgctttaaatagaaatgcaagacaaggtaaaaatccagatgatgtgaaaattggggatttaaaataactggatgttaaattttacgtttatgaatgccttttaatgtgtacattaaaataaatgagttggtttttactatttgataaaacaatactcaggtacattcaaaatcttttaaataaaaaggatggacatagatgaaaattagagtcgtcattccttgttttaatgaaggggaagtcattacacaaacacatcaacaattaactgaaatactttcacaagatagtagtgtgaaaggctatgattataatatgcttttcatagatgatggtagtacggataccactatagatgaaatgcaacatcttgccacaatagataggcatgtcagctttatttcttttagtagaaattttggaaaagaagcagctatgattgcaggttaccagcatagtactgaatttgatgcagtcatcatgatagattgtgatttgcaacatccacctgaatatattccgaaaatggttgaaggttttatggaaggctatgatcaagtgattgcaaagcgtgatagaagtggtgaaaattttagtcgcaaaacattaagccatttgtactataagttagttaattgctttgtagaagaagtacaatttgatgatggtgttggtgattttagacttttaagccaaagagctgttaaatccattgcatcacttgaagaatataatcgattttcaaaagggttatttgaatggataggctataatactaaagtgtttacgtatcaaaatgttgagagacaaaaaggggaatctaagtggtcctttaaaaagttatttaattatggtattgatggattgatttcctttaatagtaaacctttgagaatgatgatttatcttggcttgtttatcttttcaataagcgtgctatatattatctatttattcatcaatattatgatatctggtgttaatattccaggatatttttcaacgattgcagctattttattattaggcggcatacagttaatttcaattggtgttgtaggtgaatatattggcaggatatattatgaagttaaggcacgtcctaaatatattattcaagctacaaatctttcaagtattgaaaatgatgagaaggatacccataaagtttattctaaataaacaaaaaaagaagccctcattaatgggagcttctttttagtctttgcattttattttataaataaatcggattatgacgtaatgtctaatttgtgtaatgttacagtcatcgtagttcctacatctatatcactgcttacactgatttttgcgttattttgttgcgcgagttcattagctatatataagcctaatccagaaccacccgtttttgtattacgagagttttctactctgaatgtacgttcgaatatacgttcttgtagttctggtataatgccaataccttcatcgctaatagcaatgtcgatagtatcttgatctttgttttcactaatattaatatcaatgcgactaccaacatttgaaaattttagcgcattatcaagtaagtttgttaaaatacgctcaagtggcgttcgatattgataaaatgcatcaatttcgctacagaaattcacttctaatgtgcggttttcatgtttgatacgttgctcatatggttgcaatattgatacaagtaattggtctagttgtattaattctgggggatatgttttacctgtatttaaagtgataatatgagtcatatcatcaaataatgttgataatctgtttgcttgtttaattaatatgtcgtatgactctttaatctcatgatccttagtgattataccatcacgtagtccttcagaatatgaaataatgcttgctaaaggtgtttttaaatcatgggctaagttttgaatcagttctgttttttcttgttgttcggatttaatttgattcatttgttgcgtaatttcagaagccattttattaaaagattgatttaattcataaatttcttttggtgaattaaacgttttatcattgcttgcgtaatttccgttagcaaattgcttagtttttatattaaactgcttaattttttgtataagtggattaataaaaatactacatattaataaggttaaacagcttgtaattattgtcgttaaggtcaaagttagtgtcatatggccgttaaaccacattaaaatatatgcaattgctaaaatagttgaagttaatagtatactcgatacgacgccaataatgatttgacttctaattgataacaccattatcggctcctttcaaatttatatcctaatccccatacagttgtgatggtatatgttgtaaagctctctttttctaatttttctctaatacggtgtatatggacattcacggtattagcatcttcgtaatagtcatatccccaaactttttcaagtaattctgatttagaaataacttcattttctctagaagctaaataccacaataactcaaattccttaatacgcatagggacttcgtgaccatttacagtcacaactttacttaagttaataagtgttaattcatcaaacgacagttgttcaactggttgatgatggtatttcttcattcttgtaagtaaattattaatacgtaaaacgagttcccttggactaaatggttttttgacatagtcatctgcacctaaagttaaggcgtaaatggtatcatgttcttgtgttttggcagttaaatagataaaggggatatctaatttttgccttttcatttctttgacaatgtcgtaaccattaacttctggcatcatgatatcaagtaccatgatatcaatatcatttgatagtaaagaaattgcttctttaccgctagttgtcgttgttactttgtaaccttcatattcaaaataggtttgacaaatgtctacaatgtcttgttcatcatccacgatcagtaagtgggtcatctattttttcacctctgttcttacgacctctaaagtaattaatgatttctttaagtgaaatctgttttaacaatgagtgactcattagtaaaaggataaagaaagttaattgaagaggatacgtaaatatcatatctgctaagatataatttatcataacaaaggctccaaagaaactagcagcatatgcaaaaactccaaaaattaaacctaatccaattgcaatctctccgagtgggacaacaatatcaaataatgacgtcgtatgtgcaactatatttgcgaaaaaccacttataccactctggtgaatcagtattgttagcgatgactggtactaaacctttcagcgtaaatccgcccgttaatttttcgtagccttgcattaacataacaatacctgaacccacacgaatgataaatgtaacgagtagcaataatttattcatgatgttcacattctttctatttattgtgtgtaatttatataaacataagattaagcaacataatgcgatttgtagtgttatgtgaacaggaagtgtttgagctcatgggttgcttaagctaaacaaacctcaagctctaaaaaaatttacttatgtgctctgcaatcttatgggatttaatagttgtatatatattgaaaaaaggaaagtatgatttctacaagctaggggggctgtgaaatcatacgctttccattgagtaatgagtgtaatgtatatttttaaaatttgtaatgtatagtaatagtatgttgtaaataaaagtttaactcagaaattgattattttaatttagcgccgccgaagatgacgtgagcttttttacaatagattgttacttcatcatatttgcttaaatctatatttttaagatcaaatgtttgtttttctttatcgtagtcaaccattgcgatttctttaccgtttttaatgtcgccattttttgttaggtagacgtataaatctggaccttttgatgatttgtagttagtaagcattaatttaccatttttaatctcagctttaccttcaacagtttcaccgtttttagaactgaatgtacctgttaggtgttttgttttatcagttttaacattgctatcttctgactttgttttttgttcagttttgttaccttgatcttgtgaattagaattaccacaagcgcctaaagttaatacagaggcaacagcaccaactgctaaaaaatattttgtattcatgctaactcctcatttcttcaatttgataagttaagtttaaaatgaaggcaaataatatgccattaactaattcttaacttcgtttaaatatcgcttaactaatattgaagaaagaataatttgaaaatgaaaataattgtctgatttaaataaataggagtcaaaataagaggagggcatttttttaggtgagaaaatatttatctgaactagataacactataaaacacttctgatattttgaactaagaatatcagaagtgttttatagttttggtattaaaatttataaaccttttgccacaataaaaacaacaagaaaataagatagacgattaaatacaagtaccaatatggtgttaaaaccatcataacgataaatgaaatgttaataatgataagtcctttaatcattagtttctttattttgttattattttcagcagtttcatctaagctattaaatgttgaaataaacaacataataccaccaatgatgaaaattgcaggggctaaaaatggaatagacatatatattgattgtgtacttgaaaagtcggtaacacgttgcgttaaactgacaacaatcgttaatatgatagcaataaatttttggtctgtaatgtatacaggttttaattttttatcaatgtaaaactgtagtatcgtccaaatgataaacatcgttatagtacacagagtaataaagttatatttatcaattatgaatgtatttataaaggcgtttatcgtaatagataacaacattgcacttaatgataaatgttgcatttgatgcctatataaattgaatccagttataagtacgacgatagcaatattaattaatatatataaaatcatgatggactcctgttcgttatacttcaatcaactattatatcaattaatatattgttattcattagatatgacttgtaaaaagtaaaataagttttcctttatacaccttttttattactccaaagtaatgtatgaagttgtggtaacacataaacgtgattcatatcattactttgcataactaaatccaccaactgctcgtagcgttctaacaacttttcggtatgattatctacgctgtctgataaatatgggttaccaacttgtaaatagaagggaatatctggataacggtggtgtatcattttggcaaaatcataatctttatcgtcgaatacaactacttttaagtttaatgaggaaggtacgcattgtgtaatcacttcatctaacttttttaaatcaggtgtcatagttgaacttggtggttttggactaatcgttaaatcatcaatttgtgtcatccaaagttggaatttactgccttgtgtctccagtgcgctgaaaatacctttatcttgaaataagtcaactaactcttggatacctttaattaatgctgggttaccaccagaaattgtaacgtgattaaataaatcgccaccaattcgttttaattcatcataaatttcttcagcggtcatgagttttatatcgcctttagcactaccatcccaagtaaatgcagaatcacaccagctacagcgataatcacatccagctgttctcacaaacatcgtttttctaccgattactcgaccttcaccctgaatggttggaccgaatatttcgagtacaggaattttagccattagttacacctgttcctttggtctaaatacaacataacttgttggtgtttctcttacaaatacttgaatacattttggttggtgttcgagcgatgccaaattttctttaacaatttgataaattgtttccgctacgatttcagttgaagggattttatttttaaaagcaggtaagttatttaacagttgatggtcaaatttaccgtgtatcatctttttcaaatggctaaagttcactaagaagccagtgttatctagtttatcaccgacaattgttaaattaacaaagtaagtatgaccatggacattttgacaaatacctgcttcttcacaaggaatgtgatgtgcagctgaaaaattaaaatctttatttaattcgaattgatatggatgcgttgtactaggatagatttgttgtaacattttaaagcgctcctttactttcaagatattgatttagtccacgttgacgtaaatgacaagctggacattcaccacagccatccccaatgataccgttatagcatgttaatgtttttgtacgaatataatctaaaacttcgagttcatcacttaatttccacgtttctgctttgtttaaccacattaaaggagtatgaatgacaaaatctttgtccatagctaggcttaatgttacgttcattgattttataaaactatcacgacagtctgggtagcctgaaaagtctgtttcacatacgcctgtaataatatgcttagccccaatttgataagctagagcgcctgcaaacgacaagaaaagtaaatttctagctggaacaaatgtattaggtataccatcttcattattagtaatttccatatcatgttgtgttaatgcgtttggagtaagttgtgataataatgacatatctaaaacgtgatgtttcattccttgatcttgtgcaatttgttttgcgacttcaatttcagtatcatgtctttggccataattaaacgttacgagttcaacttctttgaaatgtttttttgcataaaagagacatgttgtactgtcttgaccaccactaaagacaacgatggctttttcattatttaatacactttccattttgtaattgctcctatcattaataatattaataaagaggttaatggcattgataagcccgtttttaatttataaaataaaaaaagcctatctccataaaagatagacgaaagaaatgggttgctcctataatatatattaaaggtttaccaacgaatgtttgaaatttcaatgtctagttttttatagagggtttcagctaggaacctctgatattcatttatgtacgatgaatagaatatactatatattagttaaaatcaaggtcaggataatgacaatgcttttaaagttttagctacatccaatacatattataaaaataaaacacatttagaacggagtatacaatgattctagtcatagataataatgattcatttacatataatttaatagactatattaagactcaaacgaaactaacagttcaagttgttggtattgataatctgctgatagaagacgtcattaatatgaagccaaaagcaattgttatttcacctgggccgggtaatccggatgattatcctatattgaatgaagtgttagaacaattttatcagcgtgtacctatactaggtgtatgcttaggatttcaatgtatcgtgtcttattttggtggaaatatcattcacggctatcatcctgtacacggacatactacacagttacgccataccaatgaaggtatttttcaaggactgcctcaaaatttcaatgtaatgcgttatcattcattaattgctgacggagcgacttttccaaattgcttaaagattacagccaaaaacgatgaagcgattattatggcatttgagcatattacatttccggtttttggtgtgcaatatcatcctgaatctattttgagtgaatacggttatcgacaagttgaattatttttatcgaaggtaggtgattactgtgagaatagaatataattatcgctactatttaactgaaaatgaatataagcaataccatattcaattaaagggatttataaagaagtatgttgctactaagttggctgatgtgggagaagtgatacactttgcacaagcgcagcaacgacaaggtagatatgtctcgttatatttaagttacgaagcggcaaagtattttaatcatgttatgtgtacacattcattagctaaagatgatatttatgcagtagcttatagttttgaaaaagcggaaagcataaattcaacatatgaacatcaaacttcttatgtatcaaagcatcatttttcatttgttgaatcttctgaggttatgatgactaatattaaacgtgtccaacaagcaattgttgaaggcgaaacgtatcaagtgaactatacggcgcgcttaacggataacatttattatcctattagtactttatatgaacgattaactcaatttagtaatggtaattatactgcgttattacaaacagatgaaatccaagtagcgtctatctcaccagaattattttttcaaaaaggacagtttaacaatgtcgataacgttatcataagcaaaccgatgaaagggacaatgcctagaggtaaaacggaagctgaagatcaacagtattataaaacattgcaaacttcttcgaaagatcgtgcagaaaatgtcatgattgttgatttactaagaaacgatatagggagaatatcacagagtggctcaattaaggtgtataaactattttttattgaggcatataaaactgtatttcaaatgacttcgatggtaagtggtactttaaaaactaatacagacctaactcaaattttaacatcgttatttccttgtggttcgattacaggtgcaccgaaactgaatacaatgaaatatattaaacaattagaaagttcacctcgtggtatatactgcggagcaattggactattacttccaactgaagatgataaaatgatttttaatattccgattcgtactattgagtataaatatggacaagcgatttatggagtcggagcaggtattacaattgattctaagccaaaagatgaagtgaatgaattttacgcaaaaaccaagattttggagatgttataatgcaattatttgaaacaatgaaaattgataatggacatatccctagacttacttatcatactaatcgcataaaatgttcttctgagcgattaaactttaaatttgatgaacatgcatggcgaaatgaattaaacgatgtaacaacaaagtatcacagtggccaatatagacttaaaatcgtattaaatgctgaaagcgaatttgaaacgatagtgtcacctttacctgagaaaagtagttttacagcaaaatttcaagtgttgcccaaagtagttaatccaacttttataaataataaaacgacagaacgaaagcatttagctcacaatcatgaaacagatttaatattgctaacttcagaggacggcaaggtccttgaatttgatattggcaacattgtcattgaagaggatggaaaatggtacacaccaagttataaagatgatttcttaaaaggatgcatgcgtgattatttaatagatagtgacaaacttgttgaaaaagactttaataaaaacgaattgatttataaatatcataacaatgagatacgtttatttttgataaatagtttacgagaggttgccgatgtccacctttgcctttaaaattattatgataataatgtagaaaatgatgtgaaaacaaatttaaaaattaaatggggccaaatatgattattgtttatattgtgctgttgttaattcttgtatacgtaaattatcgattagtgaatcgattgctatctgaaaatagaatatatgttgttcgtttgatagcaacaattactactgttataagctttatccttgtatacgcattaattcacgaactcatgccttttgttgtgcgggcaatggatttaatgtatcaccagtaaatttagtgagtaggtaaaatgaactattcaatcgattctataattaaaaatgaaagtaaagtaaccaaatattgaagaggtgtacaaatgaaaatatatagtcaaggtgaccaagccattgtagtcgcaattgaaaaagaagtatctaaaagtttaaccgaagatttattaacacttcgctcatatttaattgaacaaaattatccatttattatagaaattgtgccatcagaatcagacatgatgattgtctatgacgcaagggatatgattaaacaccataatatacaatcaccttttttatacatgaaagcactaatagaatcgattcatttaaacataaaacatgattttaaccagcaagatttgattgaaataccaattgtgtatggttcgaaatatggtccggatttagaatcacttttaaaacattacaaaatcaagctagaaacttttattgaattacattctaaggcgcaatattttgtttcgatgatgggatattcacctgggtttccttatttaactggattaaataagaaattgtatattaatcacacgagtaaacagaaaaaattcattccagctggttctgtagtacttgaagggaaaaaatgcggtattgtaactacggatacaattaatgattggttagttattggttatacaccattatcactttttaatccgaaagaatcagatttcgcacgcttaaagttaggcgataatattaaatttagacctatcaatgaaaatgaattagaagtaggagcgtttaaagatgtcaatcataattgaaaaaagtggcttattcagtagctttcaggactttggcagaaggggatatgaacatgatggtgtaattccatgtggtgcacttgatactttagcacatgaaattgctaatcgattagttgctaatgacaagaatgaagcaactttggaaatgactaataaaatggcaacgattcgttttacagaacctacgctgattgcattagcagggggtaatgtcaaagcttacactgagcatatgactatatctccatataaattgtatttgttagataaaggcgatgttttaaagtttagagaaacaagttatacatcgcgagtgtatttagctgtgggaggtggatttgaattagatgcatggttaggatctaattcaaccgactttaatgtaaaaattggtggttttaaaggtagaacattacaagatggcgatgaaataaagcttaagagagattatacagctcgtcatcataagttatttgaaaaccttgctcacacgaaacaaacagattggggtattgatggatacgccttgtcatttaattatatgtctgatgtatttcatgtcgttaaaaataaaggtacggaagattttaaagaagatgccattcaaagatttgtgaaacatgattataaagtaacgagcaaagcaaatcgcatggggatgatgcttgaaggtgaaaaaatcaaagctttttatgaagatatgccaccgtatcagactgtcaaaaaaggaacgatacaaattaagcgtgatggcacacctattatcctattaaatgatcattatacgctaggtagctacccgcaaatcggtacaatcgcaagttatcatttaacgaaattagcacaaaaaccgcaaggatcacgtttgaaatttcaatttatagatattttaacggctgaaaagaaccttgttaagtatagtaactggttaaaccaattattccatggaatagaatatagaatgcaattagaaatgatgaaataatatttggtacgtagctcatactcgagtccgatgcaaataatttcctcctaatgtataatgaaataatactgtgttttatctgcgaaatgtatcattttctaattcgtttcacagtaaaatgaaaagataaagtgtgtttttacttgaattttgactaaaattactctatatttattaattgagctatgcttattattacaatttgattacaaattttaaatttgttaattgaatgataatattaaataaagaaacttacacaagcaaatatgagttgtagcccaaaatacttgttaaatcaaagttgaaagctacaaataatgaaaattataaacttgaatctgaaagtaattactataattatgacaatgttaacttttaaacgcacttattaattaactacataatgttaatatctaatttattcaagtactttcgcaagatttattatctaaataacgggggaaagaatcatgagttcacaaaaaaagaaaattagtctttttgcgttcttcttattaaccgtaataacgattaccttgaagacgtatttttcttattatgttgatttttctttaggtgttaaaggtttagtacaaaacttaatattattgatgaatccttatagtttagtagcactggttttaagtgtgttcctattctttaaaggcaaaaaagcattttggttcatgttcataggcggcttcttattgacgttcctattatatgccaatgttgtgtactttagattcttctcggattttttaacgtttagtactttaaaccaagtaggtaacgtagaatctatgggtggtgcggttagtgcatcattcaaatggtatgactttgtttatttcattgatacgttagtttacttattcattttaatatttaaaacaaaatggttagacacaaaagcatttagtaagaaatttgttcctgtcgtaatggcggcttcagtagcattattcttcttaaacttagcttttgctgaaactgacagaccagaattattaacacgtacatttgaccataaatatttagtgaaatatttaggaccgtataactttacagtatacgatggtgttaaaactatcgaaaataatcaacaaaaagcgttagcatctgaagatgacttaacaaaagtattaaattatacgaaacaacgtcaaacagagcctaacccagaatattatggggtggcaaagaagaaaaatattattaagattcatttagaaagtttccaaaccttcttaattaataaaaaggttaatggtaaagaagtaacaccgtttttaaacaaattatcaagtgggaaagagcaattcacatacttccctaactttttccatcaaacaggtcaaggtaaaacatctgactctgaatttacaatggataacagtttatacggtttaccgcaaggttctgccttttcattaaaaggagataatacgtatcagtcactaccagcaattttagatcaaaagcaaggctacaaatctgatgtcatgcacggtgactataaaacattctggaacagagaccaagtatataaacactttggtatcgataaattctatgatgcaacatactatgacatgtcagataaaaacgttgtaaacttaggcttgaaagacaaaattttctttaaagattctgctaattatcaagctaagatgaaatcaccattctattctcatttaattacattgactaaccactatccattcacattagatgaaaaggatgcgactattgagaagtcaaacacaggtgatgcaacagttgatggttatattcaaacagcgcgttatttagacgaagcattagaagaatatattaatgacttgaagaaaaaaggattatatgacaattcagtgattatgatttatggtgaccactatggtatctctgaaaaccataacaatgccatggaaaaactattaggtgaaaaaatcacaccagctaaatttacagatttaaacagaactggtttctggattaaaatccctggtaaatctggtggtatcaataatgaatatgctggtcaagtcgatgtaatgccaacaattttacatttggctggtatagatacgaagaattatttaatgttcggtactgatttattctctaaaggtcataatcaagtagttccattcagaaatggtgactttataacaaaagattataaatatgttaatggtaagatttattctaataaaaataatgaactcataactactcaaccagctgatttcgaaaagaataaaaagcaagttgaaaaggatctcgaaatgagtgacaacgtgcttaatggtgatttgtttagattctacaaaaatccagacttcaaaaaggtaaatccttcgaagtataaatatgaaacaggacctaaagcaaactctaaaaaataatatttaaacacgaactcggattgataaaatatcaatccgggttttattatgttcttttatattatgttttacattatatgtgttgataaaaaggtatattataaagatcgttagcatagtcatcaaagccttatcaagttttatttatagttgaagcaacaatatattaaattatgacacttaacagtatcgatttcttttgatttcaaaaaggtgtataatgtatagaactgatttaagtacgtagagatttcaacagaagaaggaagatgggtatggaagcatataaaattgaacatttaaataaatcttatgccgataagattatattcgataatctagatttatcaatttcagaaggtgaaaaaataggtttagtaggcataaatggtacagggaaaagtacgttgttaaaagtaattggtggtattgatgatgattttacagccaatgttatgcatccaaatcaatatcgaattcgatattcgtctcagaaacaggaccttaatgaagatatgacagtttttgatgcagtattaagttctgatacaacaactttacgcatcatcaagcaatatgagcagacagtacaagcttatgcggatgaccaaagtgataaattgttcaagcgaatgatggatgcgcaagatgctatggatcaacatgatgcttgggactataacgctgaaattaaaacaatcctctcaaaactaggtatacatgatactactaaatacattaaagaattatccggcggacaacaaaaacgtgttgtacttgctaaaacattaatagaacaaccagatttattgttattagatgaacctacgaaccatttagacttcgaatcaatcagctggttgatcaattatgtgaagcaatatcctcatacagttttattcgtaacccatgatcgatattttttaaatgaagtttccactagaattattgaactaaacagaggtaagttagcgtcatatcctggcaactatgaatcttatattgaaatgcgcgctgaaagagaagtaacacttcaaaagcaacaacaaaagcaacgagctttatataaggaagaacttgcttggatgagggctggagctaaggctcgtactacaaagcaacaagctagaattaatcgatttaatgacctagaaaatgaagttaaccagcaatataaagacgataaaggtgaattgaatcttgcttattcaagattaggtaagcaagtgttcgaattagaagacttatcaaaggctattaatgataaagtattatttgaacatctgacggaaattattcaaaaaggtgagcgtattggtgttgttgggccaaatggagctggtaaaacaacactcttaaatattttgagtggagaagaccaacaattcgaaggtaaattgaagactgggcagacggttaaagtagcttattttaagcaaactgatgagaccctggatagagatattcgtatgattgattatttaagagaagaaagtgagatcgcaaaagaaaaagatggaacctcggtatctattacacaacttcttgaacgatttttatttccaagtgcaactcatggtaaaaaagtttataaattatctggtggagagcaaaagcgcttgtatttattacgtctactcgtacaccagccaaatgttctgttgttagatgaaccgacaaatgatttagatactgagactttaacaatacttgaagattatattcatactttcggtggtacagtgattaccgtaagccatgatcgctacttcttaaataaagttgcacagtcatattggtttattcatgatggtcagatggaaaagattatcggaacttttgaagattatgaaagttataaaaaatcattagataaaaataaatccacattgaagcaacaatctaaatcttctacaactgtacgtaagaaaaatggtttatcatataaagaaaaattagaatatgaacaattgatgaaacgcatagaacaagcggaagtaagaatggaagaaattgatgtgctcatgattgaggcaagtgcagattatgggaaaattaaagaactaaacgaagaaaaagaacaacttgaaattcaatatgatttagacatcacaagatggagtgagttagaagaaattaaagaacaacaataaggggtcaatttatgatgcaacaaacattatcgcattactttgggtatgaaacgtttcgaccaggacaagaagaaattattagcaaagtattagaccatcgtaatgtgcttggtgtcttaccaactggtggaggtaagtctatatgctatcaagtaccaggtttattgttaggtggtacaacaattgtaataagtccactaatatcattaatgaaagatcaagtggatcaattaaaagcgatgggaattcaagctgcttttttaaatagtagtttgactcaaaaagagcaacaacgtattgaaaaagcattatcaaatggagaaattcaatttttgtatgttgcaccagaacgatttgaaaaccgatattttttaaatatgcttcagcgtataaagattcacttagtcgcgtttgatgaagcgcattgtatttctaaatggggtcatgatttcagaccgagttatcaaaacgtcatttctaaagtatttacgttacctcaagattttacaataatagcgttgacagcaactgccacagttgaagtacagcaagatattagagaaaagttaaatatcgctcaaactgatcaaattaaaacgagtactaagcgtagaaacttaatttttaaagtaaatcctacttatcaacgtcaaaaatttatattggattatattaaaacacacgatgaagatgcaggtattatttattgttctacacgtaagcaagttgaagagcttcaagaagctttagaaagccagaaaattgaaagtgttatatatcatgcaggtttgagcaataaagaaagagaagaagcgcagaatgatttcttatttgatcgtgttaaagtagttgttgctacaaatgcttttggtatgggtattgataaatccaatgtacgctttgttattcattataatatgcctggagatttagaatcttattatcaagaagcgggtcgtgcaggtcgtgacgggttaaaaagtgaatgtattttgttatttagcgaacgcgatatcaatttacacgagtattttataacagtctctcaagctgatgatgactataaagataaaatgggcgaaaagttaactaaaatgattcaatatacaaaaacaaaaaaatgtttagaagcaacaattgtccattattttgaaccgaatgaaaaattagaagaatgtgaacaatgtagtaattgtgttcaacaagataaatcatataatatgacacaagatgctaagatgattattagttgcatcgctcgtatgaaacaacaagagagttatagtgttatcattcaagtgctaagaggagagtcaacagattatattaagtacaaaggttatgaccaaatttcaacccatggtttaatgaaaggttacacaacatcagaattaagtcacttaatagatgaattaagattcaaagggttcttaaatgaaaatgatgaaatattaatgtgtgatacttcaattaaaaaattactcagtaatgaagtagaagtattcacaacaccatttaagcaaaaagcgactgaaaaagtatttataaatacggttgaaggggttgaccgagtattattcagtcagttggtagaagttcgtaaaaagttaagtgacaaattaacgatagcacctgtaagtatattttctgattacacgttggaggaatttgctaaacgtaagcctgcttcgaaacaagatatgattaatattgatggcgtaggtagttacaaattaaaacattattgtccagcatttttagaaacgattcaaaattataaagccaaagtatagtgaagacacctagtaagcattccttgttttactgggtgttttttttgaattcaaggtaaaataacactatttcttaactggagattacctattattcattattttattaaaaaagttcaaggataaatcatttaaatttgaaaattgtaataaacgtggttaaatagggaatacatacatataatctcggttttatgctatgagaaaaaaagaggtggcaaagtgattaagtttaaaaatgtaactaagcgttatggcaaacatgttgctgtcgataacattagtttcaatattaatgagggtgaattttttgtgctaattggaccttcaggttgtggaaaaactacgacattaaaaatgattaatcgactcattcacttaagtgaaggttatatttattttaaagataaaccaataagtgattatccagtatacgaaatgcgttgggatattggatacgtattgcagcagattgcattattcccacatatgacaatcaaagaaaatattgcacaagtgccacaaatgaaaaagtggaaagaaaaagatatagataaaagagtagatgaattacttgatatggttggattagaacctgaaaaatataaaaacagaaaacctgatgaattgtcaggggggcaacgacaacgtgtaggagttatacgtgcgttagcagctgatccaccagttattttaatggatgaaccgtttagtgcattagacccaatcagccgagaaaaacttcaagatgatttaattgaattacaaactaaaattaagaagacaatcatatttgttacacatgatattcaagaggcgatgaaacttggtgataagatttgtcttttgaatgaaggccatattgaacaaattgacacaccagaaggatttaaaaataatcctcaaagtgaatttgttaaacaatttatgggtagtcatttagaagatgatgcgccatgtgttgaagagaacgcaattatccgtgacttggatattatgaaaccaatcgatgaggttacatctatgagcgcttatccaattgtttatgacaatcaaccaattgaagtattgtatcaacttttatcagagagcgagcgtgtcattgtcatgcaagaagatagcgtaggtcaatatgttattgataggaaagatatcttcaaatatttgtcccagaaaaaggaggtagctcaacatgactaactttttcgacatattgagtgaacgtaaggggcaactcttttcgacaatgatagaacatattcaaatatcatttatcgcattattgattgcaactgctattgcggtaccattaggtattttattaacgaagactaaaacgatatctgaaatcgtaatgaatattgcggcaattcttcaaaccataccatcgttggcattattaggtttaatgattcctttatttggtatcggtcgtgtgccagcaattattgcacttgtagtgtatgcgttgttaccaattttaaggaatacgtatactggaattaaagaagttgatccatcactcattgaagcggctaaaggtataggtatgaaaccatttagacgtttaactaaagtcgaacttccgatagcaatgcctgttataatggctggtgtaagaacggctatggtattaattataggtacagcaacactagcagcattaattggtgcaggcggactaggagatttaattttattaggtatagaccgtaacaatgcatcgttgatattattaggtgcaattccagcagccttattggcaattatatttgatttaattttaagatttatggctaaattatcttataaaaagttattgatgacgttaggtgttatagtgatgattattatactggctatcgctattcctatgtttgcacaaaaaggtgataaaattacgttagctggaaagcttggctccgagccatcgattattacaaatatgtataaaattttaatagaagaagagaccaaaaatactgtagaagtgaaagatggtatgggcaaaacagcatttttatttaatgctttaaaatctgacgatatagatgggtatttagaatttactggaacagttttaggtgaattaacaaaagaaccattgaagtcaaaagaagagaaaaaagtttatgaacaagctaagcaaagtcttgaaaagaaatatcaaatgactatgttaaaaccaatgaagtataacaatacgtatgctttagctgtaaaacgtgattttgctaaacaacataatatacgtacaattggtgatttaaataaggttaaagatcaacttaaaccaggatttacattggaatttaatgatcgtccagatggttacaaagctgttcaaaaggcttataatttaaatttagataacatacgtacaatggaacctaagttgagatatcaagcgatcaataaaggtaatattaatttaatagatgcatattcaactgacgctgaattaaaacaatatgatatggttgtgttaaaagatgataagcacgtatttccaccatatcaaggagcaccattatttaaagaaagctttttaaagaaacatccagaaattaagaaaccgttaaacaaactagaaaacaaaatatctgatgaagatatgcaaatgatgaactataaagtaacagttaaaaatgaagacccatatacagttgcgaaagattatttaaaagcaaaagggttaatcaaataacgaccaacgccacataagatgcgtaacaccaaattatatcttatgtggcgttgttatatttaaatctataattatgttcaatttaaacatgcaataatgattaaaaaatatgacatgttaaacacaatgtaagctattatgatgtgaaaatagtagcattgcattttagaaacatagagcgatataatgaatataagttttttaaaatttcagttaattctaaggaggttgtttttattatgaaagaacaacttaatcaactatcagcatatcagcctggtttatctccaagggcattgaaagaaaagtatggcattgaaggagatttatataaacttgcatcaaatgaaaatttgtatggaccatcgcctaaagttaaagaagcgatatcagcacacttagatgagttatattattatcctgaaacaggatcaccgacattaaaagcggcgattagtaaacatttaaatgtagatcaatcacgcattttatttggtgcgggattagatgaagttatattaatgatttctagagctgtattaacgccaggggatactattgttacaagtgaagcgacattcggtcaatattatcacaatgcgattgttgaatcagctaatgtgatacaagtacctttaaaagatggtggcttcgatttagaaggtattttaaaagaagttaatgaagatacgtcattggtatggttatgtaatccaaataatcctacaggtacatattttaatcatgagagcgtagattcgtttttatctcaagtacctccacatgtaccagtaattatagatgaagcttattttgaatttgtgacagcagaggactacccggatacacttgctttgcaacaaaaatatgacaatgctttcttattacgtacattttcaaaggcgtatggattagcgggtttacgtgtaggatatgtggtagcaagtgaacatgcgattgaaaaatggaacatcattagaccaccatttaatgtgacacgtatatctgaatacgcagcagttgcagcacttgaagatcaacaatatttaaaagaggtaacacataaaaatagtgttgaacgcgaaagattttatcaattacctcaaagtgagtatttcttgccaagtcaaacgaattttatatttgtaaaaacaaagcgggtaaatgaactttatgaagcacttttaaatgtagggtgtattacgcgaccatttccaactggtgttagaattacaattggttttaaagaacaaaatgataaaatgttagaagttttatcaaactttaaatacgaatagtaagtggggagtgggacagaaatgatattttctcaaaatttatttcgtcgtcccaccccaacttgcattgcctgtagaatttcttttcgaaattctctgtgttggggcccctgactagaattgaaaaaagcttgttacaagcgcattttcgttcagtcaactactgccaatataactttgtagagcattgaacattgatttatgtctcaagctcaatgcagtgtgaatgatgaggtgagagtattcagtgtaaaaagcaacaatagatgatattgttttgtatcaattgcttttttgctatactgaatcaatactgatattttgaggagaagattaaaatgacccgtaaatcaatcgcgattgatatggatgaagtattggcagatacattaggagaaatcattgatgctgtcaattttagagcggatttaggtattaaaatggaagctttgaatggtcaaaaacttaaacatgttattcctgaacatgatggattaattacagaagtattgagagaaccaggcttcttcagacatcttaaagtgatgccacatgcacaagaagttgtgaaaaaattaactgaacattatgatgtatatattgctacagcagcaatggatgtaccaacatcatttagtgataaatatgaatggttactagagttctttccatttttagatcctcagcattttgttttttgtggtagaaaaaacatcgttaaagctgattatttaatagatgacaatcctagacagcttgaaatttttactggtacaccgattatgtttacagcagtgcataatattaatgatgatcgatttgaacgcgtaaatagctggaaagatgtagaacagtattttttagataatattgagaaataaaatatatcacttgaaaaatttcatgtagaaaagatgatggataggctataaagtaattgtgactgagatgaacttttatgtcttagacactacaacactatattggcagtagttgactgcggggccccaacataaagaaatactttttctttagaaattagtatttcttatgcatgagtgtaactcatgcattcatatttttaagtacacattagctgtgactaatgataaagaatcgctacataaccaatcattagtcgttctttatcatttccgtcccgctctcaataaatgttagtctatctcattattataaatcggatgaatgtgttaatctatggcagattacacgtcatccgattttttatagaatttgaaaaagacgcataaaccactatgatttaaaatacaacatcaatcattttagtggcatgcgccaaaattatatgtctgtttttgaaacagggtaatagcttaaagctaataaaaacgaatataaggtgcgttgaatcttatgattacactccaaacctaatataatatcgggttaagatcattccggatgcttacaaatcattgacagtaagtaactgaatggcatttggtataacctcaatatcaataggtgtttctaatgaaatttcgccatcaatatcaactttcattgctggatctgttgtaagtgaaatctttttaccaggtatatgctcaataccttgagtgatttcattccaattcatgctatcacgctttttaaaaatatcatttaaaatactgaaactttgttcattaaaaatgaaagtgttcagttcaccatcttgaggagacaaatcagtcaatggtatacgactaccaccaatgaatgggccatttgctgttagtatcatggtcgtttcgccagaatatgtcttatcatctattgataattgataattaaattgtgttggatttagcagtgttttgacagttgatccaatataactcaatttaccaaatatatcttttgaaccatcttgtacgttttcagcgttttgaacaattagacctaacccaacaaagttgagtgcatattgattatttattttaattacatcgtatgtaccaacttgtgcagaaatcatttgttcactagcttgtttatgattaggtgctatatttagcgtttttgtaaaatcattaaaagtaccgcctggtaaaatgccaatagggagttgaaggtcatgtgacataacaccatttataagttcgttaaccgtgccatcaccgccaagaataaataatatatctacatcttttgcatagtttttagttttgatttcttggcaatatttaataatgtcaccttcgttttcactcaattgaatagaaagatgcttacaaattgaacttaatgctgttgtaacttccccaataccttgattaatattttttaatccactgtgttcatggtaaaagaggacaccatgtgtatatttattttccatagtttagcctactttctaaaaattggttcattaaatatatatacccacttttaattgttaataccaaaaatatgtttttaaatagagaaaatggtaataactgacattgatgtctatagagtgggacgagaaaaaatagttatagctgtctataacgagcatattaagcttttatttatactgatatcttgaatttaattaatagaaacctataaaaaaacagtaagccatttaaatgacttactgttttttgaattaggccaacaatattaacgtatacctttcatcgctttgatgattaaaggtgagaatgctaatacaattgttgtaacaataattgcaacaacacctaggaaaataaagtaatttgtttgacctagtggttctattaacttaactaaagtaccattgattgcttgtgcagaagcgttagttaagtaccaaatactcatcatttgggcattaaatgctttaggtgctaacttaacagcagcactattacccgttggtgataagcatagctcaccgataacacaaataatgtacgataaaataacccagttaactgagaagtttgatgaacctgatgcataacctacaataccaattagtatgtatgacgcacctgctaagaacgtaccaattgcaaattttactggcaggctaggttgtttagttccaagcttttgccataaaagtgaaataattggagctagtaataaaataaataatgggttaattgattggaagatcgcttcaccaaagtttgttttccaaccaaataagtttaatttcatatctgaatgttcaattccatatatgtttaatacattagacccttgttcttgaatagcccagaacaccattccaagaataaataatggaataaatgctttaacacgagaacgttcagtatcagtgacatctttacttctaataattaaagtgaagtaaatgattggtaatgcaatacctaatactaaaacagtattactaactaagttaaatgataatgaattagttaatgcaccaataacgataattaatacaattgctaaaacaacacttccgataataagaccatactttttcttttcagctggtgtcaatgggttagtaggtttcataccaacgctacctaagtttttgcggttgaaaagtacataccatactaaacctaatgccataccaactgctgcaatcaagaatccgccgtggaagtttttaacattaacaaagtgttgcaaaataataggtgataataatgcacccatattaactgacatatagaaaataacaaaacctgcatccatacgtctatcattttcaggatataaacggccaacgatatttgaaatgtttggcttcattaaacctgaaccaataatgatgaagaacattgatgtgaataagccgattaatgcaaatggtaagcttaaacaaatatgtccgataataataaagactgcacctaataaagtagcgcctctagtacctgtaattctgtcagcaatccatccgcctggtattgatgtcatatagattaatgaaccataaactgacataattgacatagctgttgttttatcaattccaaggccattatctgttacggcaaagtacatgtagaaaatgagtagggcacgcatgccataataactaaacctttcccagaactctacaaagaagagtacgcctagtcctcgaggatgcccgaaaaatcctgtttgaggtatgtcttgaatttgatttccatgggagttttgttgtgtcatgtatacatcccatcctttcttcccctaatacaatagtttaagtaaatttgattgtgccttatcaactaaatattccaacaaatcacaaaaaaataaaaatattgagaatattctgttattaagcgcgcacaattaattagagataatataaaaatatacttattgacgttaaagtgcaataggtttctataaaaatgttgtttaattcgtgtactaatattcttttggtgtactttggtataaaatgttattttaatgtaacctattatgtatgctaaatgaaaaacacaccaataagttaggaaaatcaacttattggtgtgtttattaaatgatacatttaacgattatctattttttcgggatataaatcatgattcatcaaacgatgctcagccattttttcatatttagaatttggacgtccatagtttgtataaggatcaatagaaattccaccacgtggtgtgaacttgccccagacttcaatataatgtgggtccataagctctatcaaatcattcataataatattcatacaatcttcgtgaaaatcaccgtgatttctgaaactaaataagtataatttcaaagattttgattcaaccattttaacatttggaatatatgaaatatagatagttgcaaaatctggttgcccagtaattggacataatgatgtaaattctggacagttgaattttacgaaatagtcacgaccttgatgcttattatcaaacgattctaatacatcaggacgatagtcaaaattgtaagtattgtcttgatttcctaataaagttatatcttgtaattcatcttgttgacggccatgtgccatataaagcgctcctttaaatttatttttttattattttggcgtctcggcgtgctttttcaaacatgtaataacttgcaccgataataacgacgtaacctaatgttgcatagaaatctggagattctccgaatagaataaatccaagtattgctgtgaaaattatagatgcatacgtgaaaatagaaatatcttttgctgctgcaaaactatatgctaatgtaacaccaatttgacccacagcggcagctaagccagcccctaatagataaagtatttgcatctgactcattggttcataggtatatgcagtgaaaggtattaaaacgatgacagaaaataaggagaagtaaaatactatagtatatggtgcttctcttgtactaagtgctcgaacacatgtatatgctgatgctgcaaaaatacctgagaataagccagctaatgatggaatcatagatgatgaaaattcaggtttcactattaaaagcatacctaaaatagcaattatcattgctgtaatttgatacttccttaccttttcatgtaagaaaacaatgcttaataaaatcgtccagaaaggattgagtttcattaatgaatcggcatcactaagtaccatatgatcaatggcataaatatttaacaatacaccaataagtccaagtgttgatcgtgttattaataagggttgacttgaaagtctgccaaacattggctgatggtatttatatataaaaaataatggaataaacattgctactaagtttcgtgctaatgatttttgaaaaacaggaaggtcacctgcaagtctgaaaaacactgacataaaactgaaaccaatagccgaaattaaaatggcaatgataccttttactttaggattcaattttatcgcctcttttatataaaattaacgtatttatattagcataaaacaacatgttgtgcataaatagttgaaatttactataaaaagactataatagactgtaccgaacaaatgttctgtgtttatttgtcggaataatagggcattacacttttatgaatgtttgtgttattacataaaacaaatatcaattcagtatcaagctaataagctttttcttgatttctgttgatacaattgagattgacacagatttaaaaaaatcaagtgatatctactaaaaaatttttttaaatttgttcaagtttttctaatttagtattggtgcctagttggaacgttttacgaacattcgattagaaaatggcactttaaatcatagtgtgtcttatgtataatgaaacacataatatagtgttggtgaaacgaaaaagacacaatatcttgtgttttgtatgcaaatgctttatttatgaagaaattacatttaaaagtaatttaacacagaaatttaatagttattatcaattaatagtcatatttttagaaaatgtactgagcaaatggaagatatccaatgatgtaaacactacatatagtgatttttatacattcaacccatataagctactattttctcaaatataaatctatgcaattggtttacatttgagaaaataagtagcttcattatagttaatacaatgctgagataaccatagtaaccatgttgttaaagcattttttaattggaatgactactttatttaaaagggttgaagaaagaaggtgatccaatgaaaataatatatttttcatttactggaaatgtccgtcgttttattaagagaacagaacttgaaaatacgcttgagattacagcagaaaattgtatggaaccagttcatgaaccgtttattatcgttactggcactattggatttggagaagtaccagaacccgttcaatcttttttagaagttaatcatcaatacatcagaggtgtggcagctagcggtaatcgaaattggggactaaatttcgcaaaagcgggtcgcacgatatcagaagagtataatgtccctttattaatgaagtttgagttacatggaaaaaacaaagacgttattgaatttaagaacaaggtgggtaattttaatgaaaaccatggaagagaaaaagtacaatcatattgaattaaataatgaggtcactaaacgaagagaagatggattctttagtttagaaaaagaccaagaagctttagtagcttatttagaagaagtaaaagacaaaacaatcttcttcgatactgaaatcgagcgtttacgttatttagtagacaacgatttttatttcaatgtgtttgatatttatagtgaagcggatctaattgaaatcactgattatgcaaaatcaatcccgtttaattttgcaagttatatgtcagctagtaaatttttcaaagattacgctttgaaaacaaatgataaaagtcaatacttagaagactataatcaacacgttgccattgttgctttatacctagcaaatggtaataaagcacaagctaaacaatttatttctgctatggttgaacaaagatatcaaccagcgacaccaacatttttaaacgcaggccgtgcgcgtcgtggtgagctagtgtcatgtttcttattagaagtggatgacagcttaaattcaattaactttattgattcaactgcaaaacaattaagtaaaattgggggcggcgttgcaattaacttatctaaattgcgtgcacgtggtgaagcaattaaaggaattaaaggcgtagcgaaaggcgttttacctattgctaagtcacttgaaggtggctttagctatgcagatcaacttggtcaacgccctggtgctggtgctgtgtacttaaatatcttccattatgatgtagaagaatttttagatactaaaaaagtaaatgcggatgaagatttacgtttatctacaatatcaactggtttaattgttccatctaaattcttcgatttagctaaagaaggtaaggacttttatatgtttgcacctcatacagttaaagaagaatatggtgtgacattagacgatatcgatttagaaaaatattatgatgacatggttgcaaacccaaatgttgagaaaaagaaaaagaatgcgcgtgaaatgttgaatttaattgcgcaaacacaattacaatcaggttatccatatttaatgtttaaagataatgctaacagagtgcatccgaattcaaacattggacaaattaaaatgagtaacttatgtacggaaattttccaactacaagaaacttcaattattaatgactatggtattgaagacgaaattaaacgtgatatttcttgtaacttgggctcattaaatattgttaatgtaatggaaagcggaaaattcagagattcagttcactctggtatggacgcattaactgttgtgagtgatgtagcaaatattcaaaatgcaccaggagttagaaaagctaacagtgaattacattcagttggtcttggtgtgatgaatttacacggttacctagcaaaaaataaaattggttatgagtcagaagaagcaaaagattttgcaaatatcttctttatgatgatgaatttctactcaatcgaacgttcaatggaaatcgctaaagagcgtggtatcaaatatcaagactttgaaaagtctgattatgctaatggcaaatatttcgagttctatacaactcaagaatttgaacctcaattcgaaaaagtacgtgaattattcgatggtatggctattcctacttctgaggattggaagaaactacaacaagatgttgaacaatatggtttatatcatgcatatagattagcaattgctccaacacaaagtatttcttatgttcaaaatgcaacaagttctgtaatgccaatcgttgaccaaattgaacgtcgtacttatggtaatgcggaaacattttaccctatgccattcttatcaccacaaacaatgtggtactacaaatcagcattcaatactgatcagatgaaattaatcgatttaattgcgacaattcaaacgcatattgaccaaggtatctcaacgatcctttatgttaattctgaaatttctacacgtgagttagcaagattatatgtatatgcgcactataaaggattaaaatcactttactatactagaaataaattattaagtgtagaagaatgtacaagttgttctatctaacaattaaatgttgaaaatgacaaacagctaatcatctggtctgaattagcagatgattagactgctatgtctgtatttgtcaattattgagtaacattacaggaggaaattatattcatgatagctgttaattggaacacacaagaagatatgacgaatatgttttggagacaaaatatatctcaaatgtgggttgaaacagaatttaaagtatcaaaagacattgcaagttggaagactttatctgaagctgaacaagacacatttaaaaaagcattagctggtttaacaggcttagatacacatcaagcagatgatggcatgcctttagttatgctacatacgactgacttaaggaaaaaagcagtttattcatttatggcgatgatggagcaaatacacgcgaaaagctattcacatattttcacaacactattaccatctagtgaaacaaactacctattagatgaatgggttttagaggaaccccatttaaaatataaatctgataaaattgttgctaattatcacaaactttggggtaaagaagcttcgatatacgaccaatatatggccagagttacgagtgtatttttagaaacattcttattcttctcaggtttctattatccactatatcttgctggtcaagggaaaatgacgacatcaggtgaaatcattcgtaaaattcttttagatgaatctattcatggtgtatttaccggtttagatgcacagcatttacgaaatgaactatctgaaagtgagaaacaaaaagcagatcaagaaatgtataaattgctaaatgacttgtatttaaatgaagagtcatacacaaaaatgttatacgatgatcttggaatcactgaagatgtgctaaactatgttaaatataatggaaacaaagcactttcaaacttaggctttgaaccttattttgaggaacgtgaatttaacccaatcattgagaatgccttagatacaacaactaaaaaccatgacttcttctcagtaaaaggtgatggttatgtattagcattaaacgtagaagcattacaagatgatgactttgtatttgacaacaaataacaattaaattaaaagaccttcacatgtaaagggaaatagcgattcgtttcgtcttgcctcctacatgttgaaggtcttttctctatgcttaaaagcgtatgcatattttgaaaaagtaaaaattgtatttaatgatgtcaatgaggctagaaagtatacaagatattgcattacaaaagggtgttctattttactttaagcaaacaaaatacacattccgaaaaattaaatttcagtttaattgcaaatatcaataaaattgacactaaattatttgaaaggctattgaaattatggtcaaaaaacgctactattaatgagaaatattatcaatgataatgattatcattaatttaaagggagaaaaatttgtaatgaagtatttattaaagggaaatattttgcttctattactaatattgttgacaattatttcgttgttcataggtgtgagtgaactatcaattaaagatttactacatttaactgagtcacagcggaatattttattctcaagccgaataccaaggacgatgagtattttaattgctggaagttcgttggctttagcaggcttgataatgcaacaaatgatgcaaaataagtttgttagtccgactacagctggaacgatggaatgggctaaactaggtattttaattgctttattgttctttccaaccggtcatattttattaaaactagtatttgctgttatttgcagtatttgcggtacgtttttatttgttaaaatcattgattttataaaagtgaaagatgtcatttttgtaccgcttctaggaattatgatgggtgggattgttgcaagtttcacaaccttcatctcattgcgcacgaatgctgttcaaagcattggtaactggcttaacgggaactttgccattatcacaagtggacgctatgaaattttatatttaagtattcctcttttagcattgacatatctttttgttaatcatttcacgattgtaggaatgggtaaagactttactaataatttaggtttgagttacgaaaaattaattaacatcgcattgtttattactgcaactattacagcattggtagtggtgactgttggaacattaccgttcttaggactagtaataccaaatattatttcaatttatcgaggtgatcatttgaaaaatgctatccctcatacgatgatgttaggtgccatctttgtattattttctgatatagttggcagaattgttgtttatccatatgaaataaatattggtttaacaataggtgtatttggaacaatcattttccttatcttgcttatgaaaggtaggaaaaattatgcgcaacaataataaaaaaataatgcttttaattgcagtaacgttattaattagtatgctgtacttatttgtaggtattgattttgaaatatttgaatatcaattttcaagtcgtttaagaaagttcatattaattattttagtaggtgctgccattgcaacttcagtggtgatttttcaagcgattacaaataaccgtctattgacaccatcaataatggggttagatgcagtttatttatttatcaaagtattgccagtctttttatttggaattcaatcggtatgggttactaatgtatatttgaactttatattaacacttataacgatggtgttattcgcactaatcctattccaaggtatctttaaaattggacatttttcaatttattttatcttacttattggtgtccttttaggaacattttttagaagcataacaggttttattcaactgattatggatcctgagtcatttttagcaatacaaagtagtatgtttgctaattttaatgcttctaattcgaatttagttactttctcagcagtgctattagtaatcttattagtcattacaattttactattgccttatttagatgtattgcttttaggtcgtgctgaagcaattaatcttgggatatcgtatgaaaaattaacgcgaattctacttgtaatagtctcagttttagtttctgtgtcaactgcattagtaggaccaattacatttttaggtttattaactgtaaatctagcgcatgaactaatgaagacgtatgaacataagtatattttaattgcgacaatttgcttgagttggattagtttatttagtgcgcaatgggtagttgaaaatgtgtttgaagctacgacagaaatgagtatacttattgatttgattggtggaagttatttcatttatctattagttagaaggagaaatgcgcaatgattcaagttgaaaatttaactaaaactataaataatcaaatgatattggaagatattagcatagatatcgaaaaaggtaaattgacttctttaattggacctaatggtgcgggtaagagtactttactttcagcgatatgtaggttaattcgttttgataacggtgaagtgaaaatagatggacagctcatgtctgattataaaaataatgacttgtcgaaaaaaatatctatattaaaacaaacaaaccatactgaaatgaatattacggtagagcagttggtaaactttggacgattcccttattctaaaggtcgtttgacgaaagaggatcatgatattgtcaatgatgcgctagatttgttgcaactacaagatatcagaaatcgtaatattaagtcattatctggtggacaacgtcagcgtgcatacattgcaatgacaatagcacaagatactgaatatattttgctagatgaaccattaaataatttagatatgaagcatgctgttcaaattatgcaaacgttaaaaatgttagcgcataaaatgaataaagcgattgtcattgtgttacatgatattaactttgcgtcctgttattcagatcagattgtagcattgaaaaacggacaactagttaagtcagatttgaaagataatgtcattcaaagtagtgttttaagtgatttatatgacatgaatattcaaattgaacatataagaaatcaaaggatttgtttatattttaaggattgataatttggagacactttaaaggggtgatgcgccaattaaagaagggttaaacgtaaagcatttatttatatttcacatcaagcacacagattaagccaaaagaggagaatattatattatgaagaaaacagtcttatatttagtattagcagtaatgtttttattagcggcatgcggtaacaattctgataaagaacaatcaaaatcagaaactaaaggttctaaagatacagtgaaaattgaaaataactataaaatgcgtggcgagaaaaaagatggtagtgacgctaaaaaagttaaagaaactgttgaagtaccaaaaaatcctaaaaatgcagttgtgttagactatggcgcattagatgtaatgaaagaaatgggcttatcagataaagtaaaagcattacctaaaggggaaggcggtaagtcattaccgaatttcttagaatcatttaaagatgataaatatacaaacgttggtaatttaaaagaagtgaattttgataaaattgctgcgacgaaacccgaagtaatctttatctctggacgtacagctaatcaaaagaatttagatgaattcaaaaaagctgcacctaaagcgaaaattgtttatgttggtgcagatgaaaagaacttaattggttcaatgaaacaaaacactgaaaatatcggtaaaatttacgataaagaagataaagctaaagaattaaataaagatttagataacaaaattgcttcaatgaaagataaaacgaaaaacttcaataaaactgttatgtatttactagttaacgaaggtgaattatcaacatttggacctaaaggtcgttttggtggattagtttacgatacattaggattcaatgcagttgataaaaaagtaagtaatagcaatcatggacaaaatgtttctaacgaatatgttaataaagaaaatccagatgttattttagcgatggatagaggtcaagcgataagtggtaaatcaactgcgaaacaagcattaaataatcctgtattaaaaaatgttaaagcaattaaagaagacaaagtatataatttagatcctaaattatggtactttgctgctggatcaactacaactacaattaaacaaattgaggaacttgataaagttgtaaaataattttaaaagaggggaacaatggttaaaggtcttaatcattgctcccctcttttctttaaaaaaggaaatctgggacgtcaatcaatgtcctagactctaaaatgttctgttgtcagtcgttggttgaatgaacatgtacttgtaacaagttcatttcaataccagtgggctccaaacatagagaaatttgattttcaatttctactgacaatgcaagttggcggggcccaaacatagagaatttcaaaaaggaattctacagaagtggtgctttatcatgtctgacccactccctataatgttttgactatgttgtttaaatttcaaaataaatatgatagtgatatttacagcgattgttaaaccgagattggcaatttggacaacgctctaccatcatatattcattgattgttaattcgtgtttgcatacaccgcataagattgctttttcgttaaatgaaggctcagaccaacgcttaatggcgtgcttttcaaactcattatggcacttatagcatggatagtatttattacaacatttaaatttaatagcaataatatcttcttcggtaaaataatggcgacagcgtgtttcagtatcgattaatgaaccataaactttaggcatagacaaagctccttaacttacgattcctttggatgttcaccaataatgcgaacttcacgatttaattcaatgccaaatttttctttgacggtcttttgtacataatgaataaggttttcataatctgtagcagttccattgtctacatttaccataaaaccagcgtgtttagttgaaacttcaacgccgccaatacggtgaccttgcaaattagaatcttgtatcaatttacctgcaaaatgaccaggcggtctttggaatacactaccacatgaaggatactctaaaggttgtttagattctctacgttctgttaaatcatccattttagcttgtatttcagtcattttaccaggagctaaagtaaatgcagcttctaatacaactaagtgttctttttgaataatgctattacgataatctaactctaattcttttgttgtaagtttaattaacgagccttgttcgtttacgcaaagcgcatagtctatacaatctttaacttcgccaccataagcgccagcattcatatacactgcaccaccgattgaacctggaataccacatgcaaattcaaggccagtaagtgcgtaatcacgagcaacacgtgagacatcaataattgcagcgccgctaccggctattatcgcatcatcagatacttcgatatgatctagtgataataaactaattacaatgccacgaataccaccttcacggataataatatttgagccatttcctaaatatgtaacaggaatctcattttgataggcatatttaacaactgcttgtacttcttcatttttagtaggggtaatataaaagtcggcattaccacctgttttagtataagtgtatcgttttaaaggttcatcaactttaattttttcatttgggataagttgttgtaaagcttgatagatgtctttatttatcacttctcagtacatcctttctcatgtctttaatatcatatagtattataccaattttaaaattcatttgcgaaaattgaaaagaaagtattagaattagtataattataaaatacggaattattgtcgttataagtattttttacatagtttttcaaagtattgttgcttttgcatctcatattgtctaattgttaagctatgttgcaatatttggtgcttttttgtatggaattgcaaagcaatatcatcattagttgataagaggtaatcaagtgcaagataagattcaaatgtttgggtattcatttgaatgatatgtagacgcacctgttgttttagttcatgaaaattgttaaacttcgccatcataactttcttattatatttatgatgcaagcgataaaaccctacataatttaagcgtttttcatctaaggatgtaatatcatgcaaattttctacacctactaaaatatctaaaattggctctgttgaatatttaaaatgatgcgtaccgccaatatgttttgtatattttactgggctgtctaagaggttgaataataatgattcaatttcagtgtattgtgattgaaaacaattagttaaatcactattaatgaatggttgaacatttgaatacatgataaactcctttgatattgaaatttaatttaatcacgataaagtctggaatactataacataattcattttcataataaacatgtttttgtataatgaatctgttaaggagtgcaatcatgaaaaaaattgttattatcgctgttttagcgattttatttgtagtaataagtgcttgtggtaataaagaaaaagaggcacaacatcaatttactaagcaatttaaagatgttgagcaaaaacaaaaagaattacaacatgtcatggataatatacatttgaaagaaattgatcatctaagtaaaactgatacaactgataaaaatagtaaagaatttaaggcactacaagaagatgttaaaaaccatctcatacctaaatttgaagcatattataagtcagcaaaaaatttgcctgatgatacaatgaaagttaagaaattaaaaaaagaatatatgacgcttgcaaatgagaagaaggatgcgatatatcaattaaaaaaattcataggtttatgtaatcaatctatcaagtataacgaagacattttagattatacgaaacaatttgaaaaaaatagatacaaagttgaatcagaaattaaattagctgataataaaagtgaagcaactaatcttacgacaaaattagaacataataataaagcgttaagagatactgcgaagaagaacctagatgatagtaaagaaaatgaagtaaaaggcgcgattaaaaatcacattatgccaatgattgaaaagcaaattaccgatattaaccaaactaatattagtgataagcatgttaataatgcaaggaaaaacgcaatagaaatgtattacagtctgcagaactattataatacacgtattgaaacaataaaggttagtgagaagttatcaaaagtcgatgtagataagttgccgaaaaagggtatagatataactcacggcgataaagcctttgaaaaaaagcttgaaaaattagaagaaaaataactataatcatttttcaaagttaaaaattttgaatttatggttaacatgtcaacttactatgtgtataatggtaaacattgatattaactatatgtataaaaatgtcacgcagatgctatttaaatgtgataaatatttttagaggtgaatagagtggctataaagctaagttcaattgaccaatttgaacaggttattgaggaaaataaatatgtttttgtattaaaacatagtgaaacttgtccaatatcggcaaatgcgtacgatcaatttaataaatttttatatgaacgcgatatggacggttattatttgattgtccaacaagaacgcgatttgtcagattatattgctaaaaaaacgaacgttaaacatgaatcacctcaagcattttattttgtaaatggtgaaatggtttggaatcgagaccacggtgatatcaatgtgtcgtcattagcacaagcagaagaataatgaaactatagggttggaacattttgccttacactactagacgtgaatagcacaacttaaattcgtgtgaatcagagtagtttggctataatgatgttctgaccttttattttatgtcacctttagaagcagttaagttagtacttttttacaaacatatgtataatgtattcgagtatttttattgaaaatattttggaaaacgacgaatccaataagaaaatttaaacatgatttgtaagttagtttaataggaaatatatgctaaaccaaaagaagcatactgttatttactggaataattaataatcatgtcatgttaaatgttcgcatataatcacgagataaaatctaaaatttaagattaatcttttatgaataaaaaacgtatcacaacaaataataaagtaaggtggtcaaggttatgaaagtattagtagccatggatgagtttcatggaattatttcgagttatcaagctaatagatatgttgaagaggcagttgcaagccaaattgaaactgcagatgtagttcaagtaccattgtttaatggaagacatgaattattagattctgtatttttatggcaatctgggcaaaagtatcgtataccagtacatgatgcagatatgaatgaagttgaaggtgtttacggacaaactgatacagggatgaccgttatcgaggggaatttatttttaaaaggtaaaaaaccaattgttgaacgaacaagttatggtttaggagaaatgattaaacatgcattagataatgacgcaaaacatgttgtaatttcactaggtgggattgatagttttgatgctggtgcaggtatgttacaagcattaggtgctcaattctatgatgacgaagggcgtgtcgtagatatgagacaaggtgctggtgtaattaaatatattcgtcgtatggatatgtcgaacttacaccctaaaatggaaacagcaagaattcaagtaatgtcggatttttcaagtcgattatatggtaagcaaagtgaaatcatgcaaacttatgatgcgcatcagttgaatcataatcaagcagcagaaatcgataatttaatttggtattttagtgagttatttaaaagtgaattgaaaattgcaattggtccagttgaacgtggtggtgctggtggtggaattgcagcagtcttgaatggactgtataaagctgaaatattaaccagtcatgcattagtagaccaactaacacatttagaaaatttagttgaacaagcggatttaattatttttggagaaggattaaatgaaaatgatcagttgctagaaacgacaacattgcgtattgcagaactttgtcataaacatcaaaaggttgccattgcaatttgtgcaactgctgaaaagtttgatttatttgaatcacaaggggttacagcaatgtttaatacatttatcgatatgccagaaacttatactgactttaaaatgggattacaaattaggcattatacggttcagtctttaaaactgttgaaaacacattttaatgttgaggtttagtaaagaaggactaaattggtgatgctgtcatgttggttaataacatttatgatggttagcaaaacgaattagaagatcgaaagtatacgtaaaaaatatgaaaaatcacgctatcattgcactgaatgttagcgtgatttttttattaattaagcctgagttggtatataatcgttggtttttagtgattttcagcgatatcttctacaattccaatgattacttgtactgctttttccataacatcaatggatgcatattcatatgggccgtggaagttaccgcaacctgtaaagatgtttggagttggtaaccccataaatgacaattgtgaaccatctgtaccaccgcgaataggttcagtgtttgctggaatatctaatttggcaaagacacgtttaggtatatcaataatatgaggcaatggtaatattttttctgccatattgaaatattgatccgatatatcaactttaactggataattttcaaaatgggcattgatatcgtcacgtatttctaaaatacgtttcttacgcaattcgaattgttttttatcatgatcacgaataatgtattgcaaagttgctttttcaacagttccttcaaagttcattaagtgataaaagccttcgtatccttctgttcgctccggaacttcactatcaggtagcaaactatcgaattgttcacctaaacgtattgcgtttaccattgcatttttagctgaaccaggatgaacatttacaccgtggcatgtaataaccgcttcagcagcgttaaagctttcatattgtaattctccatattgactaccatccatagtataagcaaaatcagcattgaagcggtcaacatcaaatttatgtggaccacgaccgatttcttcgtctggtgtaaatccaatgcgaatggtaccatgtttaatttctggatgttcttgtaaataacaaatagcttccataatttccacaatacccgctttatcgtctgcacctagtaacgatgtaccatcagttaccattaatgtatgaccaactaaactgttaagttctggaaatactttaggatctaagacacgtttagtattgcctagtttgtatggcttaccatcatagttttcaataatttgcggtttaacatttgaagcattgaaatcaggtgatgtatcaacatgcgccaaaaatccaactgttgggacgtcgacatcgatgttactttctaatgtagcaaataagtagccattttcatctaaatcagttggcaatcctaattgttgtaattctttttctaataaatgtaacaaatcccattgcttttcagttgaaggtgttgttgtagattttggatcagattgcgtatcaattgtcgtatatcttgttaatctatctatcaattggttcttcattatattcgaccccttaaactctattattcatgttgtaagattttttatatgtcttacctttgattttaccatacagttgtttgatacgtgtgtataggtaatatagaatttcagaaactaatataccgaaagcaatcgcacctgaaatcagtgtaacttctaaaaatgtatttacagcacttgtataatcatttgatactaaaaaacgagtcgcttgataagctgcaccaccaggtactaatggtataatgcctggcactatgaatataattaccggtcgtttatatctgcgactcatagtatgactcattaagcctaaaattaagcttcccaaaaatgaagcgccaacttttccaaactctaaatctaccgttaattggtaaatcgtccatgcaatggcacccacaaatccacatgctactaagaggcgtttgggtgcattgaaaatgatagagaaaagtactgttgatataaagctgattgtaaaatgaaataaataaaatagcatgctttaacagtccttccttaaatgattaataaaacgattgcgacaccagcaccgattgcgaatgctgttaatgcagcttcaacaccacgagacatacctgcaagtaattcacccgctaataaatctcgaatggcattggtaattaatataccagggacaagtggcatgacactggctatagtaatgatatcttgattggttgcaatgcctaatttagtaaatgtggctgcaatggatatgaccacagcggctgcaacaaactctgagaaaaatttaatttgtatatagcgttgcacaaagctgaatgttaaaaatgcggatccgccagcaatgactgcaatccaacaatctgatgcgacaccaccaaacataaataggaagaagccacatgcaatggcagctgcaaagaaattcgttaaaaaagaatattgtaatgatgcatgctgtaaatgaataaattcagatttagcttcatcaattgtgagttctttatttgatattttacgtgaaagactattcgttaaagcaattttctctaaatctgttgtacgctcttgtacacgaattaatcttgtacttgttcgatcatttaatgaaaaaataattgcagttgaactgacaaaactatatgtattatgaagaccataactatgtgcgatacggttcattgtatcttcaactcgatatgtttcagcacctgattcaagtaaaattctacctgcaattaatacaacatcaatcactttgttttcatctataattgtgattgaatctggcatatcaattcacctccaatgatatgtgttatttatttgaacaattgaagtttacaacttgttgttacaactttcaatagtgagactttgtgttagtatgatgaacttgtatggttcaaatttaaataagaaaaactgttaatctttgctattatactatgatttaataatagcaaaggattaacagttttgtcgttgttataaattgataatagggttaaacattactttgtttcgcccttgatttttggctacatgcaccatatcgtctgcatctttaaacactttacgctgtgattttggatcgtcatctgttaaataaccaacaccgatagacactgacaatttaataacttctttgtttggtaaatggaatgatgatttttcaacacccgaacgaatattttcagctaatttaacactttgatcaagtgaataattgtgaatgacaactgagaactcttcgccaccatttctaaaaattttaaattgattcggcacatagtttttaagtaattgagacatttgttttaatacagcatcacctgatttgtgtgagtaggtatcattgacatctttaaatccatcgatatcgattaataataaagcgatactttgatgttctttttcagcttttcgtgaaatttcatttaaatgtctatcaaattcttttacattacctaagcctgttaagtaatcatatttatcttcgttttcataacgatttacgagtgagaagaaatgccaaatatcgacaaatgttatcgctgaagctaaagtgataattaatgaaattggtattaaaatgataacttccgatagtgtgtaaataggactcactaacgcgacaccaaataaaatgattattgtaacaacattaagtattaataatgatagcacatcattttgttttaaaaatggtccaatagcacttgttactgcagcaataacaatcaacgtaacaccgtacataatcgagttgttaaatactacaatttcaacaattgctacaattactgtggcagataatgtatagaccatatttgtaaatctacctaaaaacaataaaggaacgaatgttaagtgaattaaataatcttcacgataagggatagggtagacagataataataatgatacgattgtcattaaaacagtgacataagccttagaaaaaaccatacgtttgttttctgaatactgtaagcgatggaataaatagattccagcgactataacagatatattgtatataaatgcttcgaacatgtctgaatcgactcctttaattgaccactagctattgtaagtgaaaacttacaatttgtcattagtttacatataaaattaatgtatgatatagactttgatgttaaaatgttgccttaaatgatatgatgaaaaaatgaataataggcgatatataagaaatgaatcgtatagttgtaaatatgatatcattgattgagcgaattaatttataataaagctataagatatacgtagaaaatagatatatcattctataaagacaatattaaataaatataacgttaaaaacaattaatatcgatgaaggtgaataaatggttacattattactagttgcagtaacaatgattgtcagtttgacgataacaccaattgttattgcaatatcgaaaagattaaatttagttgataaaccaaattttagaaaagtacacactaaacctatttcagttatgggtggtacagtgattctcttttcatttttaataggtatttggattggtcatcctattgaaacagaaatcaaaccacttattattggtgcgattattatgtacgtacttgggcttgtagatgatatctacgatttgaaaccgtatataaaattggctggtcaaattgccgctgccttagtagttgctttttatggtgtgactattgattttatttcgttgccaatgggtacaacgattcattttggatttcttagtattccaattactgtgatttggattgttgctattacaaatgcaattaacttaattgatggactcgatggtttggcgtcgggtgtttctgcaatcggactcattacaataggattcattgcaattttacaagctaatattttcataacgatgatttgttgtgttttattaggctctttaattgggtttttattttacaatttccatcctgccaaaatatttttaggtgatagtggggctttaatgattggatttatcatcggattcctttctttactcggattcaaaaatattacaattattgcattgttcttcccaattgttatcttagcagttccattcattgatactttgttcgcaatgattcgacgtgtgaaaaaagggcagcatataatgcaagctgataaatcgcatttgcatcataaactattagctttaggctacacacatagacaaacagtattattaatctattcaatctctattttatttagtctttcgagcattattttgtatgtatcgccaccattaggtgttgtattaatgtttgtattaatcatatttagtattgaattaattgttgaatttacaggattaatagataacaactaccgaccaatattaaatttaattagtcggaaatcgtcacacaaagaggaatagggaatgaaagcatagctgtatgggataatttgtattatatggctttactctttgcaattttttatgtattaaatttcaaatataaaaaagcactgccataaacgtgtacttcaattgtcgtttaataatacgcaattgatatttaccgtcttatgatagtgctttttatttttattcagttggtatatcgaaaggtaactgctttggagtttcttcagtcaaatcgaaatttcctgcagtcatttgatttaaaaagttaataaacgcttcatagtcacttttaacgacatcgatatagtagcttaccttatcagtgtaagtttggtttcttaacataaaatgagttgaagctaattcatattcaaatttaccagtttgatcataattcagtgttactatacatggtactgcttctcgtagttcgacacgtccgacatcataaatgacgtctctaacagcaccgctataggcgcgaattaaaccgccaccacctaatttaataccaccaaaatatcttgttactacgacacacgcattatgaacatcgagcttttttaatatgtctaacattgggacaccggcagttcctgtcggttcaccatcatcattcgctttttgaatattcatttcaggtccaatagtatatgcagaacaattatgagtggcatctttatgttctttttttattgcagcaataaatgctttagcttcatcttcattttgaacaggcttgatgtgagcaatgaatcttgatttactaatcacattttcaataatgtgttcttttttaacagtaatgatattttgtgtcataataactccttaattcataagcttaagattatttaatcttcattatacactgaaaatgacatgactataaatcgtttgattgccattttctttttaactgaaatattgtatcattgctatgagtatattttaggaggacgactatgaaaattgctgtgatgaccgattctacaagttatctttcgcaggacttaatcgataaatataatattcaaatagcgccattaagtgtgacttttgatgatgggaagaactttacagaaagtaatgaaatagcaattgaagaattttataataaaatggcatcgtctcaaacgattccaacaacaagccaaccagcaattggcgaatggattactaaatatgaaatgctaagagatcaaggttacacagatatcattgtcatttgcttatcaagtggaattagtggaagttatcaatctagttatcaagcaggggaaatggttgaaggtgttaatgtacatgcatttgatagtaagcttgcagcaatgattgaaggatgctatgtattacgtgctattgaaatggttgaagaaggatacgaaccacagcaaattattgatgatttaactaatatgcgtgaacacacaggtgcatatttaattgttgatgacttaaagaatttacaaaaaagtggtcgaattactggtgctcaagcatgggttggaacattattgaaaatgaagccagttcttaagtttgaagatggcaagattataccagaagaaaaagttcgtactaaaaagcgtgccattcaaacattagaaaagaaagtattagatattgtaaaagactttgaagaagtaactttatttgtcataaatggagatcatttcgaagatggtcaagcgttatacaaaaagttacaagatgattgtccttcagcttatcaagtagcatactctgagtttggtccagttgttgcagcacatttaggttctggtggattaggtttaggctatgttggcagaaaaataagattaacataattataaaattttaataaaagagtctatattgtaattggaaattatctctcgtatacatggctttaaatgttcatcatttgaaagccaaaatgctaaagatataagaaaatcattataatattaggctcttttttacgttgaaatgaggttttaagcattaaacattacgggaaattaattcatcctcaaacttcacttactaatgaaaaaattaaaaaagaagtaacaggtgtcatcaaacaaaattcaaactattattgtgttcaatgtgaaagtacaaatccaaagcatttttatcagtatgcttcctcagtacattccaagaaaattgtatattgcagaaattgtatatcactgggtcgaatggataatgtaacaagatataaaataacagagagttcgcaaagttcatcacaagcatattatcatctctcatttgcattgtcggaacagcagtcttatgcctcagaacatattgttcgagccattagaaagagacaaacgattttgttatatgccgtaacaggtgcaggtaagacagaaatgatgtttcaaggcattcaatatgcaagaatacagggagataatatagctattgtgtcaccacgtgtagatgttgttgtagaaattagtaaacgtattaaagacgcatttcttaatgaagatatagacatactacaccagcaatcaagacaacaatttgaagggcattttgttgtatgcacagtgcatcaactttaccgattcaaacagcactttgatactatttttattgatgaagtcgatgcctttcctatatcaatggataaaaatctacaacaagcattgaagtcatcttctaaagttgaacatgcaacaatttatatgacagcaacaccaccgaaacaacttctgtcagagattccccacgaaaatataattaaattgccagctcgctttcataaaaaatcacttccagttcctaaatattgctatttcaaacttaataataataagattcagaaaatgttataccgaattttacaagatcaaattaataatcaacgttatacactggtgttttttaacaatatagaaacaatgattaaaacattttcggtttataagcagaaaattactaaattaacatacgtccatagcgaggatgtttttcgctttgaaaaagttgaacaattaaggaatggacatttcgatgtcatttttactacgacaatattagaacgtggatttacaatggcaaatttggatgttgttgttatcgatgcacatcaatatactcaagaggctttaatacaaattgctggacgtgttggacgaaaattagaatgtcctactggaaaagtattgtttttccatgaaggagtaagtatgaatatgattcaagctaaaaaagagattcaaaagatgaacaaattagcattaaaaagaggttggattgatgaataattgtttgagttgtggtgctaagttatatgaaaatataaccatttataatttgttcaagaaacctaatagattatgtgacagatgcaaagagaattgggacaatattaaacttgatattaaagcaaggcgatgttcaaggtgcttaaaacacttaaatcaaaatgaagcgtattgtttagactgcaagtttctatcggcacactttaatttaatggaacaattatattgtcaatttcaatatgacggtttaatgaaagagatgatacatcagtataaatttttgaaagactattatttatgtgaattattggcacatttgattgaaataccacaaacatcttatgactatattgtgccaattccttcttcgccggcacatgatttatctagaacatttaacccggtagaagcagtactaaaagctaaagggattcgctttgataagattttaaagatgtcaaatagaccaaaacagtctcatttaactaagaaagagcgtctggcagatgaaaatccatttattattgatacggaattagatttaaatggcaaggaaatattactcgttgacgatatttatacaactggattaacaattcatcgtgcagggtgtaaattatatgctaaaaatatcagaaaattcaaagtgtttgcgtttgcacgatagcgtaaaaatgttaaaatataataaagagttaccaataaagaggtttaaggagagattactatgattagatttgaaattcatggagataacctcactatcacagatgctattcgcaactatattgaggaaaaaattggtaagttggaacgttattttaatgacgtaccaaatgcagtggcgcatgttaaagttaaaacttattcaaattcagctactaaaattgaagtaacaattccattgaaaaatgttacgttaagagctgaagagcgaaacgatgatttatacgcaggtattgatttaattaataataaacttgaaagacaagttcgaaaatataaaacacgtattaatcgtaagagccgtgatcgaggagatcaagaagtgtttgttgccgaattacaagaaatgcaagaaacacaagttgataatgacgcttacgatgataacgagatagaaattattcgttcaaaagaattcagcttaaaaccaatggattcagaagaagcggtattacaaatgaatctattaggtcatgacttctttgtattcacagacagagaaactgatggaacaagtatcgtttaccgccgtaaagacggtaaatatggcttgattcaaactagtgaacaataaattaagtttaaagcacttgtgtttttgcacaagtgcttttttatactccaaaagcaaattatgattatttcatagttcggtaatgtaatttgttgaatgaaacatagtgattatgctaatgttaatggatgtatatatttgaatgttaagttaataatagtatgtcagtctattgtatagtccgagtcgaaaatcgtaaaatatttataatataatttattaggaagtataattgcgtattgagaatatatttattagtgataaacttgttgacaacagaatgtgaatgaagtatgtcataaatatatttatattgattctacaaatgagtaaataagtataattttctaactataaatgataagatatattgttgtaggccaaacagttttttagctaaaggagcgaacgaaatgggatttttatcaaaaattcttgatggcaataataaagaaattaaacagttaggtaaacttgctgataaagtaatcgctttagaagaaaaaacggcaattttaactgatgaagaaattcgtaataaaacgaaacaattccaaacagaattagctgacattgataatgtcaaaaagcaaaatgattatttagataaaattttaccagaagcatatgcacttgttagagaaggctctaaacgtgtattcaatatgacaccatataaagttcaaattatgggtggtattgcaattcataaaggtgatatcgctgagatgagaacaggtgaaggtaaaacattaacagcgacaatgccaacatacttaaatgcattagctggtagaggtgttcacgttattacagtcaatgaatacttatcaagtgttcaaagtgaagaaatggctgagttatataacttcttaggtttgactgtcggattaaacttaaacagtaagacgacagaagaaaaacgtgaagcatacgcacaagacattacttacagtactaataatgagctaggttttgattacttacgagataacatggtgaattattctgaagatagagtaatgcgtccattacattttgcaatcattgatgaggttgactcaattttaatcgacgaggcacgtacgccattaattatttctggtgaagctgaaaagtcaacgtcactttatacacaagcaaatgtttttgcgaaaatgttaaaacaggacgaagattataaatacgatgaaaaaacgaaagctgtacatttaacagaacaaggtgcggataaagcagaacgtatgttcaaagttgaaaacttatatgatgtacaaaatgttgatgttattagtcatatcaacacagctttacgtgcgcacgttacattacaacgtgacgtagactatatggttgttgatggcgaagtattaattgtcgatcaatttacaggacgtacaatgccaggccgtcgtttctcggaaggtttacaccaagctattgaagcgaaggaaggcgttcaaattcaaaatgaatctaaaactatggcgtctattacattccaaaactatttcagaatgtacaataaacttgcgggtatgacaggtacagctaaaactgaagaagaagaatttagaaatatttataacatgacagtaactcaaattccgacaaataaacctgtgcaacgtaacgataagtctgatttaatttacattagccaaaaaggtaaatttgatgcagtagtagaagatgttgttgaaaaacacaaggcagggcaaccagtgctattaggtactgttgcagttgagacttctgaatatatttcaaatttacttaaaaaacgtggtatccgtcatgatgtgttaaatgcgaaaaatcatgaacgtgaagctgaaattgttgcaggcgctggacaaaaaggtgccgttactattgccactaacatggctggtcgtggtacagatatcaaattaggtgaaggcgtagaggaattaggcggtttagcagtaataggtacagaacgacatgaatctcgtcgtattgatgaccagttacgtggtcgttctggacgtcaaggtgataaaggggatagtcgcttctatttatcattacaagatgaattaatgattcgttttggttctgaacgtttacagaaaatgatgagccgactaggtttagatgactctacaccaattgaatcaaaaatggtatcaagagctgtagaatcagcacaaaaacgtgtagaaggtaataacttcgacgcgcgtaaacgtatcttagaatacgatgaagtattacgtaaacaacgtgaaattatctataacgaaagaaatagtattattgatgaagaagacagctctcaagttgtagatgcaatgctacgttcaacgttacaacgtagtatcaattactatattaatacagcagatgacgagcctgaatatcaaccattcatcgactacattaatgacatcttcttacaagaaggtgacattacagaggatgatatcaaaggtaaagatgctgaagatattttcgaagtcgtttgggctaagattgaagcagcatatcaaagtcaaaaagatatcttagaagaacaaatgaatgagtttgagcgtatgattttacttcgttctattgatagccattggactgatcatatcgacacaatggatcaattacgtcaaggtattcacttacgttcttatgcacagcaaaatccattacgtgactatcaaaatgaaggtcatgaattatttgatatcatgatgcaaaatattgaagaagatacttgtaaattcattttaaaatctgtagtacaagttgaagataatattgaacgtgaaaaaacaacagagtttggtgaagcgaagcacgtttcagctgaagatggtaaagaaaaagtgaaaccgaaaccaatcgttaaaggcgatcaagttggtcgtaacgatgattgtccatgtggtagtggtaaaaaattcaaaaattgccatggaaaataaatgatataaaataactccttccaattaaacacctatagtttgtgttatgggaggagtctttttattttacaagcgttaaatactttaaaaaatgtgaagaagttgttaaacgttgttatgtacttagttttaaaaaatcggtttaggcatatgtcgatgataaatgtactgatttttaacaataaatgcataaactaattgtcagtgtgcttatatttcttaacattgttatttaacaaaattatgttaaaatttagcattataaaagatacaaatcaatgacttgaattgaaatataaataggagcgaatgctatggaattatcagaaatcaaacgaaatatagataagtataatcaagatttaacacaaattagggggtctctttgacttagagaacaaagaaactaatattcaagaatatgaagaaatgatggcagaacctaatttttgggataaccaaacgaaagcgcaagatattatagataaaaataatgcgttaaaagcaatagttaatggttataaaacactacaagcagaagtagatgacatggatgctacttgggatttattacaagaagaatttgatgaagaaatgaaagaagacttagagcaagaggtcattaattttaaggctaaagtggatgaatacgaattgcaattattattagatgggcctcacgatgccaataacgcaattctagagttacatcctggtgcaggtggcacggagtctcaagattgggctaatatgctatttagaatgtatcaacgttattgtgagaagaaaggctttaaagttgaaactgttgattatctacctggggatgaagcagggattaaaagtgtaacattgctcatcaaagggcataatgcttatggttatttaaaagctgaaaaaggtgtacaccgactagtacgaatttctccatttgattcatcaggacgtcgtcatacatcatttgcatcatgcgacgttattccagattttaataatgatgaaatagagattgaaatcaatccggatgatattacagttgatacattcagagcttctggtgcaggtggtcagcatattaacaaaactgaatcggcaatacgaattacccaccacccctcaggtatagttgttaataaccaaaatgaacgttctcaaattaaaaaccgtgaagcagctatgaaaatgttaaagtctaaattatatcaattaaaattggaagagcaggcacgtgaaatggctgaaattcgtggcgaacaaaaagaaatcggctggggaagccaaattagatcatatgttttccatccatactcaatggtgaaagatcatcgtacgaacgaagaaacaggtaaggttgatgcagtgatggatggagacattggaccatttatcgaatcatatttaagacagacaatgtcgcacgattaatatatattttaaaaccgaggctctaaaagggcgtcggtttttggtttttttaaaggtagctaaataaattgtaaattagattttggaatatgatttgtttatgaatatttaagtacaattcggtagatagagttagaatatattttttgaaagttgtatttgttaaaacaacatatgcagtgtgcatttagtaatattacctatggcgattttcaaggtattgaattaatcgttgaaaacgttctcaattacatggtatgaatacattttacactatgataaaaggttgtattctttttatattgttaaccatttgattacatcgttataacaatagcttttgacaaaatgtattgtgctatagtatttgcatacttaaaatactaacagcaaaggaatgacagcaagatgaaaaaaactcttacagtgacggtttcgtcagtgttagcttttttagctttaaataatgcagcacatgcacaacaacatggcacacaagtaaaaacacctgttcaacataattatgtatcaaatgttcaagcacaaacgcaatcaccgacaacttatacagtagttgctggcgattcattatataagattgcattagagcatcacttaacgttgaatcaattatattcatacaatcctggtgtaacacctttaatttttcctggtgacgtgatttcacttgtgcctcaaaataaagtgaaacaaactaaagcggttaaaacaccagtaagaaaagcaagccaagctaaaaaggtagtaaaacaacctgtacaacaagcgtctaaaaaagtagtagttaagcaagcacctaagcaagcagtagctaagacagttaatgtagcatacaaacctgctcaagtacaaaaatcagtaccaactgtacctgttgcacataactacaataaatcagttgctaacagagggaacttatatgcttatggaaactgcacatattatgctttcgatcgtcgtgcacaattaggtagaagtataggaagtttatggggcaatgcaaataactggaattacgcagcaaaagttgcaggatttaaagtagataaaacaccagaagttggcgctattttccaaacagctgctggcccatatggacatgttggtgttgttgaatctgtaaaccctaatggaacaattactgtttctgaaatgaactatgctggatttaatgttaaatcttcaagaacaattttaaatccaggaaaatataattacatccactaagtaatatatcaagacaagactatcctcttagcctgtttaagtaacaggttgagaggattttttggtatcatttaatcagagttatataaagaagatatttaaatgatatttaattgattgatatgtaaaaagaaagtataatttatgattaattaatggaggaggtaattgaaatgggtgtacatcaatattttaaaagattatcagatatggaaagacttataagattacctggaaaatttaaatattttgaacacaatgttgcagcacactcctttaaagtaactaaaattgctcaatatctagcaacagttgaagaatatcatggacgaaagattaattggaaaagcttatatgaaaaagcattaaatcatgatttcgccgaagtgtttactggtgatataaaaacacctgttaaatatgcgagtagtgaattaaaaaaattattttcgcaagttgaagaagaaatggtagagacctttattgaagaagaaattccactacaatatagagatgtttataagcaacgactgcaagaaggtaaagatgattcattagaaggccaaatactttcagttgctgataaaattgatttgctttatgaaacatttggagaaatacaaaaacgtaatcccgaagaattatttttcgaaatttatgaaatgagtctagaaacaattattcaatttgaccatttagcatctgtacaagattttattaataatatcattccagaaatgttgactgaaaactttatacctagaacagaattaagagaaacaaccatgaacattttaaataaaagaaaagaggaaaatgaatgatatggtattttagcgcagcattctttccatgtgtcttggtagtattatttagtgtaataacaagaagtaaatgggtcggtactattctgacattaattttaattggtgcctcaatctataaagagtatttccataacgagtggattatttttattgatgtagtgtcattattagctggttatttaattatagatcaactcgaatttcataaacatcaagatgaagatcgctaagattaactttaaaataatgtttcaaacaaatttgttgaaacaaaatgatgattaatataatgtgtatttacatactaaaaataacaagataaacgatttgatttaaggcaagcatagttagcacaactatgtttgtttttctttgttcgacatttttacgaacaaacgtttgctttttgtgtgactactttgctaaaatatgtaatgagaaagcaaagagttgagcggaaatataaataatacgttgaaagaggaggcatatgtgacaatggttgaacattatccttttaaaatacattctgattttgagcctcaaggtgatcaaccgcaagcaattgaagaaatcgtggaaggtattaaagcggggaaaagacatcaaactttattaggtgctactggcacagggaaaacatttacgatgagtaatgttattaaagaagttgggaaaccaacgttaattatcgcgcataacaaaacattagcaggacaattatatagtgagtttaaagaattttttcctgaaaacagggtggaatactttgtaagttactatgattattatcaaccagaggcatacgtaccgtctactgacacttttattgaaaaagatgcctcaatcaatgatgaaattgatcaactacgacattctgctacaagtgcattatttgaacgcgatgatgtaattattattgctagtgtaagttgtatatatggtttaggtaatcctgaagaatataaagatttagtagtaagtgttcgagttggtatggaaatggatagaagtgaattacttagaaaacttgtagatgtgcaatatacacgaaatgacatcgatttccaacgaggaacgtttcgagtgcgtggtgatgtagttgaaatattcccagcctctaaagaagaactttgtataagggttgagtttttcggcgatgagattgaccgtatccgagaagttaactacctaacaggtgaagtgttgaaagaaagagaacattttgcgatattcccagcttctcacttcgtaacacgtgaagaaaagttgaaagttgcgattgaacgtattgaaaaagaattggaagaacgattgaaagaattacgagatgagaataaattactagaagcgcaaaggttagaacagcgtaccaactatgatttagaaatgatgcgagagatgggattctgttcaggaattgaaaactattccgtacatttaactttgcgaccactgggttcgacaccatatactttattggattactttggcgatgattggttagtaatgattgatgaatcacatgtgacattaccgcaagttcgaggcatgtataacggagacagagcgcgtaaacaagttttggtggatcatgggtttagattaccgagtgcattagataaccgtccacttaaatttgaagaatttgaagaaaagacaaaacaacttgtgtatgtatctgcaacgcctggaccatacgaaattgaacatacggataagatggttgaacaaattattcgtcctactggtttactggatcctaagattgaggttagacctactgaaaatcaaattgacgatttattaagtgaaattcaaataagggttgagcgtaatgaacgcgtacttgttacaacgctcactaaaaagatgagtgaagatttaaccacatacatgaaagaagcgggtattaaagttaattatctgcattcagaaatcaagacattagaacgaatcgaaataattagagacttacgaatgggtacatatgatgttatcgtaggtattaatttattaagagagggtattgatataccagaagtttctctagttgtcatattagatgcagataaagaaggatttttacgttctaaccgctcattaattcaaacaataggtagagctgcgcgtaacgataaaggtgaagtcattatgtatgccgataaaatgactgattcgatgaagtatgcaattgatgagacacaacgtcgtcgagaaatacagatgaaacataatgaaaaacatggtattacacctaaaacaattaataaaaaaatacatgatttaattagtgctactgttgaaaatgacgaaaataatgacaaagcacaaactgtgatacctaagaagatgacgaaaaaagaacgtcaaaagacaatcgacaatatagaaaaagaaatgaaacaagcagcgaaagatttagatttcgagaaagctacagaattaagagatatgttatttgaattaaaagcagaagggtgacaagtaaatgaaagaaccatccatagtagtaaaaggtgctcgtgcgcataacttgaaagatattgatatcgaactacctaaaaataaattaattgttatgacaggtttatctgggtcaggtaaatcgtcattagcattcgatactatatatgctgaaggacaacgacgttatgttgaatcattaagtgcctatgcgcgtcaatttttaggccaaatggacaaaccagatgttgatacaattgaaggattatcgccagcaatttcaatagatcaaaaaacaacaagtaaaaatccaagatcaactgtagcaacagtaacagaaatatatgattatatacgtttgttatatgcacgtgttggtaaaccttactgtccaaatcacaatatagaaattgaatcgcaaacagtacaacaaatggttgaccgcattatggaattagaggcacgtacaaagattcaattattagcacctgtcatcgctcatcgtaaaggtagtcatgaaaagctaatcgaagatattggtaaaaaaggttatgtacgtttaagaatcgatggcgaaattgttgatgtaaatgatgtacctactttagataagaacaagaatcatacaatagaagttgttgtagaccgattagttgttaaagatggaattgaaacacgactagctgactctatagaaactgccttagagctttcagaaggacaattaacagtcgatgtcattgacggggaagaccttaagttttcagaaagccatgcttgtcctatatgtggattttcaatcggagagttagaaccaagaatgtttagctttaacagtccttttggtgcttgtccgacatgtgatggcttaggccaaaagttaacagtcgatgtagacttggttgttcccgacaaagataagacgctaaacgaaggtgcaatagaaccttggataccgacgagttctgatttttatccaacattgttaaaacgtgtttgtgaagtttataaaatcaatatggataaaccttttaaaaagttaacagaacgtcaacgtgatattttattgtatggttctggtgacaaagaaattgaatttacatttacacaacgtcaaggtggtactagaaaacgaacaatggttttcgagggtgtagttcctaatataagtagacgattccatgaatctccttcagaatatacacgtgaaatgatgagtaaatatatgactgaactaccttgcgaaacttgtcatggaaagcgattgagtcgtgaagcgttatctgtttatgtaggtggtttaaatattggtgaagtagtcgaatattcaatcagtcaagcgctgaactattataaaaacattgatttgtcagaacaagatcaagcgattgcaaatcaaatattgaaagaaattatttcccgacttacttttttaaataatgtgggacttgaatatttaacgttaaacagagcttcaggtacactttcaggtggtgaagcacaacgtattcgattagcaacgcaaattggatcgcgtttgactggtgtcttatatgtattagatgagccatcaattggactgcatcaaagagataatgatcgattaattaatacacttaaagaaatgagagatttaggaaatactttaattgtagttgaacacgatgatgatacaatgcgtgcggctgattacttagtggatataggtcctggtgctggtgaacatggaggacagattgtgtctagtggtactcctcaaaaggtaatgaaagataaaaaatcattaacaggacaatacttgagtggtaagaaacgtattgaagtacctgaatatcgcagaccggcttcagatcgtaaaatttctatacgtggagctagaagcaacaatcttaaaggggttgatgtggacataccactatcaatcatgacggttgttacaggtgtatcaggttctggtaaaagctcattagtaaatgaagtattatacaaatcattagctcaaaaaattaataaatctaaagtaaagccaggattgtacgataagattgaaggtattgatcaacttgataaaattattgatattgatcaatcaccgataggtagaacgccacgctctaatccagcaacatatactggtgtgtttgatgatatacgtgatgtgtttgcgcaaacaaatgaagctaaaattcgaggatatcaaaaagggcgttttagttttaatgtaaaaggtggacgctgtgaagcttgtaaaggtgacggtattattaaaattgaaatgcattttttacctgatgtttatgttccttgtgaagtgtgtgatggtaaacgatataatcgtgagacactagaggttacttacaaaggtaaaaatattgctgacattttagaaatgactgttgaagaagcaacacaattttttgaaaatattcctaagattaagcgcaagttacaaacactagttgatgttggtcttggatacgtcacattaggtcaacaagctacaacgttatcaggtggtgaggctcaacgtgtgaaacttgcatctgaacttcataaacgttcaactggtaaatctatttatatcctagatgaaccgacaacagggttacatgttgacgatattagtagattattaaaagtattaaaccgattagttgaaaatggtgatactgttgtaattattgaacataacctagatgttatcaaaacagcagactatattatcgacttaggtcctgaaggtggtagtggcggtggtactattgttgcgactggcacacccgaagatattgctcagacaaagtcatcatatacaggaaagtatttaaaagaagtacttgaacgagataaacaaaatactgaagataaataagattaaaagaagtgaaggatgttataaatttatccttcgcttctttttattaatttagtaatgaatagtagaaagaaaagatgcgtaaaaagaattatgttaagatagggtcaatctagagtagttaaacataaatcgaactgggagtgggacagaaatgataaagaatcactaatgatttattatgtagtggttctttgtcattagccacagctattgtgtacttaaaaataggaatgcatgagtgcaactcatgcataagaaatactaatttctaaagaaaaagtatttctttatgttggggcccaccccaacttgcattgtttgtagaatttcttttcgaaattctctgtgttggggccccgccaactaattccaatatatcattgtggagcttaggtccattgatttatggctcggacttttatggcgatatgaaccatgtaaattaagcaagcaataaattaatgattgatattgacttgtaaaataataacaataatgaacaattaatatttattttagcttttcaatgtagattggtgttatatttttgatatgataagaagagatgtaagagtagggataaatacaattgaggtgaacccatgttaacgacagaaaaactagttgaaacattaaagttagatttaatcgctggtgaagaaggactatcgaagccaattaaaaatgctgatatatcaagaccgggcttagagatggcaggttatttttcacattatgcgtcagatagaatacaactattaggaacaacggaactatcgttttacaatttattaccagataaggatcgcgcaggtcgtatgcgtaaactatgcagaccagaaacgcctgcaattattgtgacacgtggattgcagccaccagaagaattagttgaagctgcaaaagaattaaataccccacttatagttgctaaagatgcgactacaagtttaatgagtcgcttaacaacgtttttagagcatgcacttgcaaagacgacatctttacatggtgttctagtagatgtttacggtgttggtgtactaattaccggtgattcaggaataggtaaaagtgagactgcgttggaattagttaaacgtgggcatagattagtagcagatgataatgtagaaatacgtcaaattaataaagatgaactaatagggaaaccaccaaagttaatagaacatctattagaaatacgtggactaggtattatcaatgttatgactttatttggcgcgggttcaatattaactgaaaaacgaattagattaaatattaatttggaaaactggaacaagcaaaagttatatgaccgcgtaggtcttaatgaagagacgctaagtattttagatactgaaatcactaaaaaaacaatccctgtaagacctggtagaaatgttgcggtaattattgaggtcgctgcaatgaactatcgattaaatatcatgggcattaacacggccgaagaatttagtgaaagattaaatgaagaaattatcaagaacagtcataagagtgaggagtaggttgaatgggtattgtatttaactatatagatcctgtggcatttaacttaggaccactgagtgtacgatggtatggaattatcattgctgtcggaatattacttggttactttgttgcacaacgtgcactagttaaagcaggattacataaagatactttagtagatattattttttatagtgcactatttggatttatcgcggcacgcatctattttgtgattttccaatggccatattacgcggaaaatccaagtgaaattattaaaatatggcatggtggaatagcaatacatggtggtttaataggtggctttattgctggtgttattgtatgtaaagtgaaaaatttaaacccatttcaaattggtgatatcgttgcgccaagtataattttagcgcaaggaattggacgctggggtaactttatgaatcacgaggcacatggtggacctgtgtcacgcgcttttttagaacaattacatttgccaaattttataatagaaaatatgtatattaacggccaatattatcatccaacattcttatatgaatccatttgggatgtcgctggatttattatcttagttaatattcgtaaacatttaaaattaggagaaacattctttttatatttaacttggtattcaattggtcgattctttatagaaggattacgtacagatagcttaatgctcacaagtaatattagagttgcacaattagtatcaattcttttaattttaataagtataagtttaattgtatatagaaggattaagtataatccaccgttgtatagcaaagttggggcgcttccatggccaacaaaaaaagtgaagtagtgatagtttgaggaaatttttatcaaaaacacatcatcatacaaaccctttatggcgtgtataccgtcttgttaaattttcgaaagtttttaagaatgtaattatcattgaattttcgaaatttattccaagtatggtactgaaaagacatatatataaacaacttttaaatattaatatcggtaatcaatcgtcgatagcttataaagtaatgttagatattttttacccagaactgattacgattggtagtaacagtgttattggttacaatgtaacaattttgacgcatgaagcattagttgatgaatttcgttatggaccagtgacgataggatctaacactttgattggtgcaaatgctaccattttacccggtataacgattggtgacaatgtaaaagttgcagctggtacggttgtttcaaaagatataccggataatggatttgcatatggcaaccctatgtatataaaaatgattaggaggtgacaattttatggcgcaaaagaataataatgtaattccaatgacttttgatgatgcattttatcgtaaaatggctaaacagaagtttaaacaaagagaatataaacgagctgctgaatactttgaaaaagtgttagaattgtcacctgatgatctggaaattcaaattgattatgcacaatgtctagtgcaacttggtattgctaaaaaagcagaacatttattttatgacaatattatttataataggcatctagaagatagcttttatgaattgagtcagctcaacattgaagttaacgaaccaaacaaggcattcttgtttggtattaattatgttattgttagcgacgaccaagattatagagatgaattagatcaaatgtttgatgtgaaatatcaaagtgaagaacaaattgaacttgaagctcaattgtttgtagttcaaatactattccaatatcttttttctcaaggtcgattaaaagatgcaaagaattatgtcttacatcaaccacaagaagttcaagatcatcgtgtcgtacgtaatttattggcaatgtgttatttatatctcggcgaatatgatacggctaaagcattgtacgaagcactattacaagaggatagtacagatatatatgcattatgccattatactttgctactttataacactaaggaaaatgaacaataccaaaaatatttaaaaatattaaataaagttgtacctatgaatgacgatgaaagttttaaattaggtattgttttaagttatttaaagcagtatcgtgcatcacaacaattgttgtaccctttatataaaaaaggaaaatttttatcaattcaaatgtacaatgctttagcatataattattattatttaggtgaagaagacgaaagtcattactactgggataaattgaagcaaatttctaaagtggaaattggacatgcgccttgggtaattgaaaatagcaaagaagtttttgaccaacatattttgccattacttcaaagtgatgacagtcattatcgtttatatggtatttttttattggatcaattaaatggtaaagaaattgtgatgacggaaagtatttggcaggttctggaaaatctaaataattatgagaaattgtatttaacgtatttagttcaaggtttaacgctcaataaattagacttcattcatcgcggcttgttaacgctttaccaaaatgaattatttgtaagtgaaaatgatttaatggttgcatggattaatcaaggtgaactcataattgctgaaaaagtagatttaactgatgttgagccatatatcggtgcgtttatttatttgtattttaaaaatcaacctcgaaacgttacaaagaagcaaattacaacatggttaggcataacacaatataaactgaacaaaatgattgaatttctcttgagcatatagatttatgaaaagttagatttattatataatgcgcataatgattaataatgaggaggcgttaataaaatgactgaaatagattttgatatagcaattatcggtgcaggtccagctggtatgactgctgcagtatacgcatcacgtgctaatttaaaaacagttatgattgaaagaggtattccaggcggtcaaatggctaatacagaagaagtagagaacttccctggtttcgaaatgattacaggtccagatttatctacaaaaatgtttgaacacgctaaaaagtttggtgcagtttatcaatatggagatattaaatctgtagaagataaaggcgaatataaagtgattaactttggtaataaagaattaacagcgaaagcggtcattattgctacaggtgcagaatacaagaaaattggtgttccgggtgaacaagaacttggtggacgcggtgtaagttattgtgcagtatgtgatggtgcattctttaaaaataaacgcctattcgttatcggtggtggtgactcagcagtagaagagggaacattcttaactaaatttgctgacaaagtaacaatcgttcaccgtcgtgatgagttacgtgcacagcgtattttacaagatagagcattcaaaaatgataaaatcgactttatttggagtcatactttgaaatcaattaatgaaaaagacggcaaagtgggttctgtgacattaacgtctacaaaagatggttcagaagaaacacacgaggctgatggtgtattcatctatattggtatgaaaccattaacagcgccatttaaagacttaggtattacgaatgatgttggttatattgtgacaaaagatgatatgacaacatcagtaccaggtatttttgcagcaggagatgttcgtgacaaaggtttacgccaaattgtcactgctactggcgatggtagtattgcagcgcaaagtgcagcggaatatattgaacatttaaacgatcaagcttaattcgaagtcgaattaagatgttgagctgtaaattatttggatatttattttaatagtgtcatcacattgttaatataatgtcttacttttaaattaaagcaaattatatagaaaactagaacttagtacgtatcatttgtgcgtttcaatgagttctagtttttttatatgttatattaaacttataactttatgggagtgagacagaaatgatatttttacaaaatttatttcgttgtcccaccccaactcgcacattatcgtaagctgacttttcgtaagcttctgtgttggggccccgccaacttgcattgtctgtagaaattcttttcgaaattctctgtgttggggcccacaccccaacttgcattgtctgtagaaattggaaatccaatttctctgtgttggggcccacaccccaactcgcattgcctgtagaatttcttttcgaaattctctgtgttggggcccctgactagagttgaaaaaagcttgttgcaagcgcattttcattcagtcaactactagcaatataatattatagaccctaggacattgatttatgtcccaagctccttttaaatgatgtatatttttagaaatttaatctagacatagttggaaataaatataaaacatcgttgcttaattttgtcatagaacatttaaattaacatcatgaaattcgttttggcggtgaaaaaataatggataataatgaaaaagaaaaaagtaaaagtgaactattagttgtaacaggtttatctggcgcaggtaaatctttggttattcaatgtttagaagacatgggatatttttgtgtagataatctaccaccagtgttattacctaaatttgtagagttgatggaacaaggaaatccatccttaagaaaagtggcaattgcaattgatttaagaggtaaggaactatttaattcattagttgcagtagtggataaagttaaaagtgaaagtgacgtcatcattgatgttatgtttttagaagcaagtactgaaaaattaatttcaagatataaggaaacgcgtcgtgcacatcctttgatggaacaaggtaaaagatccttaattaatgcaattaatgatgagcgagagcatttgtctcaaattagaagtatagctaattttgttatagatactacaaagttatcacctaaagaattaaaagaacgcattcgtcgatactatgaagatgaagagtttgaaacttttacaattaatgtcacaagtttcggttttaaacatgggattcagatggatgcagatttagtatttgatgtacgatttttaccaaatccatattatgtagtagatttaagacctttaacaggattagataaagacgtttataattatgttatgaaatggaaagagacggagattttctttgaaaaattaactgatttgttagattttatgatacccgggtataaaaaagaagggaaatctcaattagtaattgccatcggttgtacgggtggacaacatcgatctgtagcattagcagaacgactaggtaattatctaaatgaagtatttgaatataatgtttatgtgcatcatagggacgcacatattgaaagtggcgagaaaaaatgagacaaataaaagttgtacttatcggtggtggcactggcttatcagttatggctaggggattaagagaattcccaattgatattacggcgattgtaacagttgctgataatggtgggagtacagggaaaatcagagatgaaatggatataccagcaccaggagacatcagaaatgtgattgcagctttaagtgattctgagtcagttttaagccaactttttcagtatcgctttgaagaaaatcaaattagcggtcactcattaggtaatttattaatcgcaggtatgactaatattacgaatgatttcggacatgccattaaagcattaagtaaaattttaaatattaaaggtagagtcattccatctacaaatacaagtgtgcaattaaatgctgttatggaagatggagaaattgtttttggagaaacaaatattcctaaaaaacataaaaaaattgatcgtgtgtttttagaacctaacgatgtgcaaccaatggaagaagcaatcgatgctttaagggaagcagatttaatcgttcttggaccagggtcattatatacgagcgttatttctaacttatgtgtcaatggtatttcagatgcgttaattcattctgatgcgcctaagctatatgtttctaatgtgatgacgcaacctggggaaacagatggttatagcgtgaaagatcatatcgatgcgattcatagacaagctggacaaccgtttattgattatgtcatttgtagtacacaaactttcaatgctcaagttttgaaaaaatatgaagaaaaacattctaaaccagttgaagttaataaggctgaacttgaaaaagaaagcataaatgtaaaaacatcttcaaatttagttgaaatttctgaaaatcatttagtaagacataatactaaagtgttatcgacaatgatttatgacatagctttagaattaattagtactattcctttcgtaccaagtgataaacgtaaataatatagaacgtaatcatattatgatatgataatagagctgtgtaaaaaaatgaaaatagacagtggttctaaggtgaatcatgttttaaataagaaaggaatgactgtacgatgagctttgcatcagaaatgaaaaatgaattaactagaatagacgtcgatgaaatgaatgcaaaagcagagctcagtgcactgattcgaatgaatggtgcacttagtctttcaaatcaacaatttgttataaatgttcaaacggaaaatgcaacaacggcaagacgtatttattcgttgattaaacgtgtctttaatgtggaagttgaaatattagtccgtaaaaaaatgaaacttaaaaaaaataatatttatatttgtcgtacaaagatgaaagcgaaagaaattcttgatgaattaggaattttaaaagacggcatttttacgcatgaaattgatcattcaatgattcaagatgacgaaatgagacgcagttacttgagaggagcttttctggcaggtggctcagtgaataaccctgaaacatcttcgtaccatttggaaattttttctcaaaatgagagtcatgcagaaggcttaacgaaactaatgaatagttatgagttgaatgccaaacatttagagcgaaaaaaaggaagtattacgtatttaaaagaagcggaaaagatttcggattttcttagtttgataggtggctatcaagcgttattaaaatttgaagacgtacgtattgtaagagatatgcgtaattctgttaaccgactcgttaattgtgaaacggccaatctaaataaaacagttagtgctgcgatgaaacaagttgagagcattaaattgattgataaagaaattggtattgaaaatttaccagacaggttgagagagattgctagaattcgagtagaacatcaagaaatttcgttgaaagagcttggagaaatggtatcaactggtccaatttcaaaatcaggtgtaaatcaccgattaagaaaacttaatgatttagccgataagattagaaatggtgaacaaatagaattataagtaagaaggtgtttttggtagtgaattatcaaaaataccttttttatgattaaaaagtgtttaatgaataatagtcgactaactattaaattgagctggaaagtttaatgaaggaaattcaataaccaagcgttacctaattttctcattaagtagcatcatatgtatcaatttggtcataagaaaatatgaatgtgataattaattgagtcactgatcatagacaaaaacaaaatcagcataaaaaagaatcccgactttgcgggattctctgtattgaaaagtattgtattttattaaaacagcctccttgaagggaattgaacccctatcttaagaaccggaatcttacgtgttatccattacaccacaaggagcaaatatgtaatcatatctctgtactatgagaagtaaaataagtacaatctaaaatagatattatcagtttacaaaggaaagagaaaagcgtcaaacaatgtaactatttaaagtcaaagtgtttgaccaaatttgacttaatatgtaaaataatgagtaacagttattacaaggaggaaatatagatgaatttaattcctacagttattgaaacaacaaaccgcggtgaacgtgcatatgatatatactcacgtttattaaaagaccgtattattatgttaggttcacaaattgatgacaacgtagcaaattcaatcgtatcacagttattattcttacaagcgcaagactcagagaaagatatttatttatacattaattcaccaggtggaagtgtaacagctggttttgcgatttatgatacaattcaacacattaaacctgatgttcaaacaatttgtattggtatggctgcatcaatgggatcattcttattagcagctggtgcaaaaggtaaacgtttcgcgttaccaaatgcagaagtaatgattcaccaaccattaggtggtgctcaaggacaagcaactgaaatcgaaattgctgcaaatcacattttaaaaacacgtgaaaaattaaaccgcattttatcagagcgtactggtcaaagtattgaaaaaatacagaaagacacagatcgtgataacttcttaactgcagaagaagctaaagaatatggcttaattgatgaagtgatggtacctgaaacaaaataattcaaagtaaagagtagactaagcagtctgctctttttgtatgagtaaaccgaggtgtcaataaattgtttactatactttgagcggaaatatgattgaatgaagctagttgaatcgtaactatatgaaatgttcccttcaaagtagacattgaaaggaacatttcaatcctttgtttgtaagtcgctctagacattacatttagtacatatgttgtttctaatgctcattaatggtattgattattctttgattaaatcttcaagtgccatttttaaattactatatttaaattggaatcccaatgcttgaattttattaggtaatactttttgagtatccaatactactgttgacatttgaccaagtatgagacgcattgcaagacttggtgcccaagtttcatggggcttatgcatagctcttgctaaagtgtagccaaataaattttgacgctcaggtataggtgcagttaaattaaacggaccactagctgactcgttatttattaaaaataaaatagcttgaattaaatcattgatatgaatccatgaataccattgttgaccagaacctaatttaccaccaatgtaatatttgtatggtagtttcattgtttgtaacgcaccgccttcattcgataaaatcataccgaaacgaccgatgacaactcgcgtacctaattgttcaaattgttgtgcgaaacgttcccattgatacacaatatctgataagaaatcaaatggtaaagttttataaacttctgtgtaactcataaataaatcaggaggatagtaaccagtggcactagcattaaataaaactttaggtgctttattgcgtgatttaaacaattcatataaagcttgcgtagattgaattctacttagcattagcgtttgtttatattccggtgtccatcgtttattcaatgtagcacctgctaagttgatgaccacatcgatattttgaggaactttgtgttcccacccagatttagcccagttgacatatgaaattttcttatcatttgaaatttggtcgtgtcgcgttaatatcgtgatatgtgaatctgattttttaatttcattaactaattgagatccaaccataccagtcccaccagtaattaagtattgtttcattatcattcaccccatgtaattttgtatttagttactatttaataatcattattgttgttcaaaggttatacattatttagacaataatatgtcaataactttttttgaattgtattttaataaaaatgatataagttataataaaggtgtaccttcgataacgaataaacatctcttaaaagtatgtgtaaaacgctgcatgatacaaacgaaggtaaaaatttgactccctttagtagtggacccgtacgtttatcgtgcgggtcgtttttatttatttcttattcccattatacatcaatttaaagcattaattttttaaacaaatttaagaatacatagtaatataacaatctaaacataaaaacttttaacacaacacttaaaccaatgctttaattttcaatacgtagctataatttgttgtaaaatcaaaaaggttaaaatgttaattttcaaaaaaaggctcaaaatatgtttgatttagttattaaatgttaagatatataagactactatttctttgtaaaaatgaatccgatttacgagtgagtaatagtgaaggcagttttaagttgaagaaggcaaaaagagtaaatgtttattaatatttgtagaaactaggtaagcaaattagttgtgaaaatgttaatggttgcgtgataatttctatatttaaattagtttgaagtgagggagagtatgtcgaatcaaaattacgactacaataaaaatgaagatggaagtaagaagaaaatgagtacaacagcgaaagtagttagcattgcgacggtattgctattactcggaggattagtatttgcaatttttgcatatgtagatcattcgaataaagctaaagaacgtatgttgaacgaacaaaagcaggaacaaaaagaaaagcgtcaaaaagaaaatgcagaaaaagagagaaagaaaaagcaacaagaggaaaaagagcagaatgagctagattcacaagcaaaccaatatcagcaattgccacagcagaatcaatatcaatatgtgccacctcagcaacaagcacctacaaagcaacgtcctgctaaagaagagaatgatgataaagcatcaaaggatgagtcgaaagataaggatgacaatgcatctcaagataaatcagatgataatcagaagaaaactgatgataataaacaaccagctcagcctaaaccacagccgcaacaaccaacaccaaagccaaataataatcaacaaaataatcaatcaaatcagcaagcaaaaccacaagcaccacaacaaaatagccaatcaacaacaaataaacaaaataatgctaatgataagtagtatttagtcaaacaaaaatgaaccagtatgacagacaacacaattaattaggttgtctcgaatattggttcttatttttataattgttaattaggggagagatgatacttaaatagttagttgtttattttacggatagtgaaatttattttgagtgaggtgggacagaaatgatattttcgcaaaatttatttcgtcgtctgaccccaacttccattgcctgtagaatttcatttcgaaattctctatgttggggccccaccccaacttgcattgcctgtagaaattgggaggagccaatttcactatgttggggcccctgactttaattggaaaaagcttgttacaagtgcattttcgttcggtcaactactactaatgtaactttttggattctagagcattgatttatgtcctagtctcaaataataagcaaatgattatcgagtcagtataagggtatacatttgactacagcgaataaaataaaacgttttgttgcataacaaatcgaaaatgtattgcaagcgctttatcaaattatttagaaaatttaagttttatgcttgcaatttttgaaatagaatagtactattgcaagtgtaaagaggttaatttttgtcccacgcgggacttaaaaaggcaaccactggttgtgacatatccttatttacatttataaatataaggaggaggtagtagtgaaagacttattgcaagcacagcaaaagcttataccggatctcatagataaaatgtataaacgtttttctattcttactactatctcaaaaaatcagcctgtcggacgtcgaagtttaagcgaacatatggatatgactgaacgtgtactgcgttctgaaacagatatgcttaagaaacaagatttgataaaagttaagcctaccggaatggaaattacagctgaaggtgagcaactgatttcgcaattgaaaggttactttgatatctatgcagatgacaatcgtctgtcagaaggtattaagaataaatttcaaattaaggaagttcatgttgttcctggtgatgctgataatagtcaatctgttaaaacagaattaggtagacaagcaggtcaattacttgaaggcatattacaagaagacgcgatagttgctgtaactggcggatccacgatggcatgtgttagtgaagcaattcatttattaccatataatgtattcttcgtaccagccagaggtggactaggcgaaaatgttgtctttcaggcaaacacaattgcagccagtatggcacaacaagctggcggttattatacgacgatgtatgtacctgataatgtcagtgaaacaacatataacacattgttgttagagccatcagtcataaacactttagacaaaattaaacaagcaaacgttatattacacggcattggtgatgcgctgaagatggcgcatcgacgtcaatcacctgaaaaggtcattgaacaacttcaacatcatcaagctgtcggagaggcatttggttattattttgatacacaaggtcaaattgtccataaggttaaaacaattggacttcaattagaagaccttgaatcaaaagactttatttttgcagttgcaggaggcaaatcgaaaggtgaagcaattaaagcatacttgacgattgcacccaagaatacagtgttaatcactgatgaagccgcagcaaagataatacttgaataagagataaaaagtttaatactttttaaatatcattttaaaggaggccattataatggcagtaaaagtagcaattaatggttttggtagaattggtcgtttagcattcagaagaattcaagaagtagaaggtcttgaagttgtagcagtaaacgacttaacagatgacgacatgttagcgcatttattaaaatatgacactatgcaaggtcgtttcacaggtgaagtagaggtagttgatggtggtttccgcgtaaatggtaaagaagttaaatcattcagtgaaccagatgcaagcaaattaccttggaaagacttaaatatcgatgtagtattagaatgtactggtttctacactgataaagataaagcacaagctcatattgaagcaggcgctaaaaaagtattaatctcagcaccagctactggtgacttaaaaacaatcgtattcaacactaaccaccaagagttagacggttctgaaacagttgtttcaggtgcttcatgtactacaaactcattagcaccagttgctaaagttttaaacgatgactttggtttagttgaaggtttaatgactacaattcacgcttacacaggtgatcaaaatacacaagacgcacctcacagaaaaggtgacaaacgtcgtgctcgtgcagcagcagaaaacatcatccctaactcaacaggtgctgctaaagctatcggtaaagttattcctgaaatcgatggtaaattagatggtggtgcacaacgtgttcctgtagctacaggttcattaactgaattaacagtagtattagaaaaacaagacgtaacagttgaacaagttaacgaagctatgaaaaatgcttcaaacgaatcattcggttacactgaagacgaaatcgtttcttcagacgttgtaggtatgacttacggttcattattcgacgctacacaaactcgtgtaatgtcagttggcgaccgtcaattagttaaagttgcagcttggtatgataacgaaatgtcatatactgcacaattagttcgtacattagcatacttagctgaactttctaaataattttagtatagtttttattcaaatacgctagtgctcagaactatttagcattaattaaagcttatgagtaagcggggagcacaaacgcttctccgcttatttttatataaaatttcctaattacaaggaggaaacaccatggctaaaaaaattgtttctgatttagatcttaaaggtaaaacagtcttagtacgtgctgattttaacgtacctttaaaagacggtgaaattactaatgacaaccgtatcgttcaagctttacctacaattcaatacatcatcgaacaaggtggtaaaatcgtactattttcacatttaggtaaagtaaaagaagaaagtgataaagcaaaattaactttacgtccagttgctgaagacttatctaagaaattagataaagatgttgttttcgtaccagaaacacgcggtgaaaaacttgaagcagctattaaagaccttaaagaaggcgacgtattattagttgaaaatacacgttatgaagatttagacggtaaaaaagaatctaaaaatgatccagaattaggtaaatactgggcatctttaggtgatgtgtttgtaaatgatgcttttggtactgcgcatcgtgagcatgcatctaatgttggtatttctacacatttagaaactgcagctggattcttaatggataaagaaattaagtttatcggtggcgtagttaacgatccacataaaccagttgttgctattttaggtggagcaaaagtatctgacaaaattaatgtcatcaaaaacttagttaacatagctgataaaattatcatcggcggaggtatggcttatactttcttaaaagcgcaaggtaaagaaattggtatttcattattagaagaagataaaatcgacttcgcaaaagatttattagaaaaacatggtgataaaattgtattaccagtagacactaaagttgctaaagaattttctaatgatgccaaaattactgtagtaccatctgattcaattccagcagaccaagaaggtatggatattggaccaaacactgtaaaattatttgcagatgaattagaaggtgcgcacactgttgtatggaatggacctatgggtgtattcgagttcagtaactttgcacaaggtacaattggtgtatgtaaagcaattgcaaaccttaaagatgcaattacgattatcggtggcggtgattcagctgcagcagcaatctctttaggttttgaaaatgacttcactcatatttcaactggtggcggagcgtcattagagtacctagaaggtaaagaattgcctggtatcaaagcaatcaataataaataataaagtgatagtttaaagtgatgtggcgtgtttgtttaacattgttacgggaaaacagtcacaagatgacatcgtgtttcatcacttttcaaaaatatttacaaaacaaggagtgtctttaatgagaacaccaattatagctggtaactggaaaatgaacaaaacagtacaagaagcaaaagacttcgtcaatgcattgccaacattaccagattcaaaagaagtagaatcagtaatttgtgcaccagcaattcaattagatgcattaactactgcagttaaagaaggaaaagcacaaggtttagaaatcggtgctcaaaatacgtatttcgaagataatggtgcgttcacaggtgaaacgtctccagttgcattagcagatttaggcgttaaatacgttgttatcggtcattctgaacgtcgtgaattattccacgaatcagatgaagaaattaacaaaaaagcgcacgctattttcaaacatggaatgactccaattatatgtgttggtgaaacagacgaagagcgtgaaagtggtaaagctaacgatgttgtaggtgagcaagttaagaaagctgttgcaggtttatctgaagatcaactaaaatcagttgtaattgcttatgaaccaatctgggcaatcggaactggtaaatcatcaacatctgaagatgcgaatgaaatgtgtgcatttgtacgtcaaactattgctgacttatcaagcaaagaagtatcagaagcaactcgtattcaatatggtggtagtgttaaacctaacaacattaaagaatacatggcacaaactgatattgatggggcattagtaggtggcgcatcacttaaagttgaagatttcgtacaattgttagaaggtgcaaaataatcatggctaagaaaccaactgcgttaattattttagatggttttgcgaaccgcgaaagcgaacatggtaatgcggtaaaattagcaaacaagcctaattttgatcgttattacaacaaatatccaacgactcaaatcgaagcgagtggcttagatgttggactacctgaaggacaaatgggtaactcagaagttggtcatatgaatatcggtgcaggacgtatcgtttatcaaagtttaactcgaatcaataaatcaattgaagacggtgatttctttgaaaatgatgttttaaataatgcaattgcacacgtgaattcacatgattcagcgttacacatctttggtttattgtctgacggtggtgtgcacagtcattacaaacatttatttgctttgttagaacttgctaaaaaacaaggtgttgaaaaagtttacgtacacgcatttttagatggtcgtgacgtagatcaaaaatccgctttgaaatacatcgaagagactgaagctaaattcaatgaattaggcattggtcaatttgcatctgtgtctggtcgttattatgcaatggaccgtgacaaacgttgggaacgtgaagaaaaagcttacaatgctattcgtaattttgatgccccaacttatgcaactgccaaagaaggtgtggaagcaagttataatgaaggcttaactgacgaattcgtagtaccattcatcgttgagaatcaaaatgacggtgttaatgatggagatgcagtgatcttctataatttccgacctgatagagcagcacaattatcggaaatttttgcgaacagagcattcgaaggctttaaagttgaacaagttaaagacttattctatgcaacattcactaagtataacgacaatatcgatgcggctatcgttttcgaaaaagttgatttaaataatacaattggtgaaattgcacaaaataacaatttaacacaattacgtattgcagaaactgaaaaatatcctcacgttacttactttatgagtggtggacgtaatgaggaatttaaaggtgaacgccgtcgtttaattgattcacctaaagttgcaacgtatgacttgaaaccagaaatgagtgcttatgaagttaaagatgcattattagaagagttaaataaaggtgacttggacttaattattttaaactttgctaaccctgatatggttggacatagtggtatgcttgagccgacaatcaaagcaatcgaagcggttgatgaatgtttaggagaagtggttgataagattttagacatggacggttatgcaattattactgctgaccatggtaactctgatcaagtattgacggatgatgatcaaccaatgactacgcatacaacgaacccagtaccagtgattgtaacaaaagaaggcgttacacttagagaaactggtcgcttaggtgacttagcacctacattattagatttattaaatgtagaacaacctgaagatatgacaggtgaatctttaattaaacactaatattgtaaaagatgttaagtaaacgcttaatgacacttattttttgaaaataatagtaatatcattttgttaaatgaaagaataaagctataataattatagaataactatttaaaggagattataaacatgccaattattacagatgtttacgctcgcgaagtcttagactctcgtggtaacccaactgttgaagtagaagtattaactgaaagtggcgcatttggtcgtgcattagtaccatcaggtgcttcaactggtgaacacgaagctgttgaattacgtgatggagacaaatcacgttatttaggtaaaggtgttactaaagcagttgaaaacgttaatgaaatcatcgcaccagaaattattgaaggtgaattttcagtattagatcaagtatctattgataaaatgatgatcgcattagacggtactccaaacaaaggtaaattaggtgcaaatgctattttaggtgtatctatcgcagtagcacgtgcagcagctgacttattaggtcaaccactttacaaatatttaggtggatttaatggtaagcagttaccagtaccaatgatgaacatcgttaatggtggttctcactcagatgctccaattgcattccaagaattcatgattttacctgtaggtgctacaacgttcaaagaatcattacgttggggtactgaaattttccacaacttaaaatcaattttaagcaaacgtggtttagaaactgcagtaggtgacgaaggtggtttcgctcctaaatttgaaggtactgaagatgctgttgaaacaattatccaagcaatcgaagcagctggttacaaaccaggtgaagaagtattcttaggatttgactgtgcatcatcagaattctatgaaaatggtgtatatgactacagtaagttcgaaggcgaacacggtgcaaaacgtacagctgcagaacaagttgactacttagaacaattagtagacaaatatcctatcattacaattgaagacggtatggacgaaaacgactgggatggttggaaacaacttacagaacgtatcggtgaccgtgtacaattagtaggtgacgatttattcgtaacaaacactgaaattttagcaaaaggtattgaaaacggaattggtaactcaatcttaattaaagttaaccaaatcggtacattaactgaaacatttgatgcaatcgaaatggctcaaaaagctggttacacagcagtagtttctcaccgttcaggtgaaacagaagatacaacaattgctgatatcgctgttgctacaaacgctggtcaaattaaaactggttcattatcacgtactgaccgtattgctaaatacaatcaattattacgtatcgaagatgaattatttgaaactgctaaatatgacggtatcaaatcattctataacttagataaataatcattttaaacattaagtactgtcataattttagttgaggattattatgtcggtataaattgaataaagtttttgagttcatgcttaaaaagttcacgcttgtatttataacctgccacagagttgagactgtggtaggttttttattttggatggcttcaaatcatgatttataaggggcttgataaatcgtgagatagccaataacacatatttaacttgtattcttaaactggtataataaatttatgttgaaatgaatattgtatgacagggtattcacttttattaaaaggtaaaattaaataaaggttttatagaacgtatttaaatatatgaggagtaaacaaatggctgatagaacgaataaagaaattaaaacaggacgctttattgcaactgcatcaatcgtattctcaatattattgattattcattactttgtttcgttggataatgcgactgccaaagcattacttaatttaacgaatcaaaacacttcagataaagcgattgattacattttaaacagctttagattcactggtattatgtatattttggcttatctagcaggcttcatcactttttggaatcgacatacttatgtgtggtggtttatgtttgcagtttatgtatcaaatagtttgtttacgttgattaatttatcaatcacaattcaagcaataaaagctgcacacggtgcgtacttaacattgccaattttaatcgttattataggttcggttgcattagcgatttatatgcttgttgtttctatcaaacgtaaaagtacatttaatcgctagaaaattgattttaacaataaaaatatgatatactacttgtcgtatataaggaacggaggacaatttatgcatacatttttaatcgtattattaatcattgattgtattgcattaataactgttgtactactccaagaaggtaaaagcagtggactttcaggtgccatcagtggtggtgctgagcagttattcggtaaacaaaaacaacgtggcgtcgatttattcttaaatagattaacaattattttatcaatattattttttgtacttatgatttgcataagttatcttggtatgtaaggtccggcgatgtaaatgtcgggcttttttatttataattaagaatgtaatagtttaacaataagctatgtaaaatatatagcctagttaagtatgcaaagggagcgttagatttatgcagataaaattaccaaaacctttcttttttgaagaaggcaaacgtgccgtgttattattacatggatttacaggcaattcgtctgatgtacgtcaattaggtcgatttttacaaaaaaagggatatacttcgtatgcaccacaatatgaaggtcacgcggcaccaccagaggaaatactgaaatctagtcctttcgtttggtttaaagatgcgttagatggttatgattatcttgttgaacaaggttatgatgaaattgttgttgctggtctatcattaggtggggattttgctttaaaattaagcttaaatagagatgtaaagggtattgtaacgatgtgtgcaccaatgggtggcaaaactgaaggtaccatttacgaaggctttttagagtatgcacgtaactttaaaaagtatgaaggtaaagatcaagagactattgataatgaaatggatcattttaaaccaactgaaactttaaaagaactaagtgaatcattagatacgattaaagagcaagttgatgaagtgttggatcctattttagtgattcaagcagaaaacgacaatatgattgatccacaatccgcaaattatatatatgaccatgtagattctgatgacaaaaatatcaagtggtacagtgaatctggacatgttattacgattgataaagagaaagaacaagtatttgaagatatttatcaatttttagagtcattagactggtcagaataaaaagagattttaacattagaaaggaggggcataatgaatttaaagcaatctatagaagagattattaatcaacctgaatatgaacctatgtcagtgtcagattttcaagatgcattaggtttaagcagtgccgactcgtttagagatttaattaaggtgcttgtggagttagaacaatcaggattaatcgaacgtacaaaaacagacagataccaaaaaaagcatagttctagaggtcaatcaaaattgataaaaggaacgttaagtcaaaataaaaaaggctttgcattcttaagacctgaagatgaggatatggaagatatatttattcccccgacgaaaattaatcgtgccttggatggagatactgttattgtagaaacacatcaatctaaaggtgaacataaaggtaaaattgaaggggaagttaaatcgattgagaagcattcagtaactcaagttgttggtacgtatagtgaagctagacatttcggatttgttattccagatgataaacgtattatgcaagatattttcattcctaaaggacaaagtttaggtgcagtagatgggcataaggtacttgttcaaattactaaatatgctgatggttcagataatccagaaggacatatttctgctattttaggacataaaaatgatcctggcgtagatattttatctattatctatcaacatggcatagaaattgaatttcctgatgaagtgttacaagaagctgaagcagtacctgatcatattgaaaatactgaaattaaaggccgtcatgatttacgtgatgaattgacaatcacaattgatggtgctgatgctaaagacttagatgacgcaattagtgttaaaaagttagcgaacggtaatacgcagttgactgtaagtattgctgatgtcagttattatgtaactgaagattcagctttagataaagaagcttatgatagagcgacaagtgtatatcttgttgaccgtgtgattccgatgattccacatcgattaagcaatggtatttgttcattaaatcctcacgttgatcgtttaacgttaagctgtcgcatggaaattgatgctagtggtcgcgttgttaaacatgaaatttttgatagtgttatacattctgattatcgaatgacgtatgatgcggtaaatcagattattactgaaaaggatcctaacattcgcgaacaatataaagaaattacgcctatgttagatttagcacaagatttatctaatcgtttgattcaaatgagaaaacgacgtggtgaaatcgattttgatattagtgaagcaaaagtattagttaacgaggacggtataccaacagatgttcaattaagacaacgtggcgagggtgaacgtctaattgaatcatttatgttaattgcaaatgaaacagttgctgaacattttagtaagttagatgtaccttttatttaccgagtgcatgagcaacctaaatcagatcgcttaagacaattctttgattttattacaaactttggcatcatgattaagggtactggcgaagatattcatccaacaacacttcaaaaggttcaagaagaagtagaaggtcgacctgaacaaatggtcatttcaacaatgatgttacgttcaatgcaacaagcgcattatgatgatgtgaacttgggacattttggcttatcagctgaatattatacgcattttacatcaccaattagacgttatcctgatttaacagttcatcgtttaatccgtaagtatttaattgagaaatcaatggataacaaagaagtgaagcgttgggaagacaaattgcctgagttagctgaacatacttctaaacgtgaacgtcgtgctattgaggcagaacgtgatactgatgaattgaaaaaagcagaatatatgattcaacatattggtgatgaatttgaaggtattgtcagctcagtagctaacttcggtatgttcattgaattgccaaatacgatagaaggtatggttcatattgcgaatatgactgatgattattaccgttttgaagagcgtcaaatggcattaattggtgagcgtcaagctaaagtatttagaattggtgacacagttaaggttaaagtgacgcatgttgatgtagatgaacgattaattgattttcaaattgttggaatgcctttacctaaaaatgaccgctcacagcgaccagcaagaggtaaaacgattcaagctaaaacgcgtggcaaatctttagataaatcgaaatctgatgataagggtcgtaagaaaaaaggtaagcaacgtaaaggtaaaaaccaacgtaataatgataaatcaggtaatagtaagcataagccattttataaagataaaagtgtgaaaaagaaagcacgtcgtaagaaaaaataagcagcaatgaggtgagtatgaatggctaagaagaaatcaccaggtacattagcggaaaatcgtaaagcaagacatgattataatattgaagacacgattgaagcgggaatcgtattacaaggtacagaaataaaatcgattcgccgaggtagtgctaaccttaaagatagttatgcgcaagttaaaaacggtgaaatgtatttgaataatatgcatatagcaccatacgaagaagggaatcgttttaatcacgatcctcttcgttctcgaaaattattattgcacaagcgtgaaatcattaaattgggtgatcaaacacgtgagattggttattcgattgtgccgttaaagctttatttgaagcatggacattgtaaagtattacttggtgttgcacgaggtaagaaaaaatatgataaacgtcaagctttgaaagaaaaagcagtcaaacgagatgttgcgcgcgatatgaaagcccgttattaagcgatttagttgcttaatcgggctatatttgatatagttatatgtgcttttgtaaattacaaaagtatgatttgtttgatttattatttcggggacgttcatggattcgacaggggtcccccgagctcattaagcgtgtcggagggttgtcttcgtcatcaacacacacagtttataataactggcaaatcaaacaataatttcgcagtagctgcctaatcgcactctgcatcgcctaacagcatttcctatgtgctgttaacgcgattcaaccttaataggatatgctaaacactgccgtttgaagtctgtttagaagaaacttaatcaagctagcatcatgttggttgtttatcacttttcatgatgcgaaacctttcgataaactacacacgtagaaagatgtgtatcaggacctctggacgcgggttcaaatcccgccgtctccatatttgtagcctacaacttttgtggatgtgggcttttttattatgtgtttttcaggggataatgcattgcagaatttgttgtgagtattgatatagcagtgtttgtataggtgtttatttgatggaggaaagagtaataagtgattatgaattagtttttgagatataaggggacagtgatgtgtgtcaaataagtgtcaaaaaagttggattctgagttttacattcaacattgttcatgaagaaacttctttatacgcaaaaaattctccatgttatatatgtcaatataaaaatgtgaatcgtctacacttaattggataaatggctactgaaaaagaacttttcatttttgttacgtcactaagtgggtgtagttataaagagatgagccgagttttgatattttcattagaatcaatatgcctattaacacaatcagcaatagttgacgagacggaaataaaagaagtcgtagttaagaaatgcatttcacaacataccattgtagccatttttattgttttggatgataaactctttttggaatttttagtttttataatttgcaactacactacttcttttactaatattaatgtctaagtaatcgataaaaaattttccattgaataaatgagaagttaaaaactttacttaacctttctcattgcattttcctattcacgattttaagaacccaacatactacaaacgaattttaaaaggcgagagtaaagcttacttgtttattatacatatttaaaatccaagagtcagaacagactactcctctttataactataaaaaatagctatgaaaaaatctatcgtcatagattccttcatagctaatcttagtatgtttatttttattttaggatgctatttatcaactcaacatataactcactatttttataaccttctaatatatcattaacttgtctaataggtatttctggtacttctctaatgttttccaattttgttttaaattgtttttttgttatttgctctttatttgtagccaattggaacaagtaagaatctagcatattaatttctttatatgaatacatatatcttaataacactaaatctctagtttttaagttaggcgctagttcttcttgtaattgttctattgattgtttcattaataacaatctcatttctaattcttcattattcattttatcacactctttttatattaatgcttgaccaacttgggaaacccaaaaccctatgcttcttgcagtagaatctttaataccagttcccatcaatgcttgtgaaacttgaccttgtacatttccccatgtagcctcttcttgttttaatgcattattcaatgcgggatttacaaatttatcccatcttttttttatgattttccggcacggggactgatttctttaacaccattaaacacagattttttatttttaatcatagctttatagtatcatgttggctaagctataaataagtcagtttctctaaaaattaaataactgaatgtaagacaatcaacaaaccaaatttatacttcatctaaaccactgtggtcgtcatctttttgcttttctttttctttctctcgttcttgttcttttttgtactcttcttcaaattctttttctttcttttctacttcttctcttgtttccgctctatgagaaaaatcttcggttttgagtttactaaatttgaatgatttagaatcaactgttttatcttctgagtatttatggacatttaaattaatatttccatcacctcttaactcatagataaacatggcttgtgcagttttgccttttttaatttgatcttggttatgttctgtccaatctttatattttttatcacttaaaagataaccatctcttaatttatttactgtatttttatcatcttgagtgatattaatatagtcatgagaaatagaagatggatttaaatctttatcgtcttttttagcagtaatttccattttaaaagcgatatatttctttttctcatctttttcattgatgataaacggttcttttattttagcttcaaatttgtcactaacaatagtatcgcctttaatttttatatccatattttttttgcttttaaattctttaagttcttcatttaattcttcattgtcattttctttctttttgtgactagtgctctctttttttgcactatcttgatgatgtccacaagcacctaagataagtgtacttgctaataatatccccattacttttttcatttaacatgtctcctttatttcgcaaaaatttattttaaaaactctaaatgacttatcattttgagtaattaaacaaagttgatattttgtgagattctaagatgatattaaataattcttgtaataatgattctatgtattgttgcaataaattaatgaaactataattactaatattatattacttttattgatagaaatatattacttttttaaaaaacttgtaatatatcgaaagatttaaatgtaaaattttgatttgttaagaaattacgtttgtaaaaataaaaaaatcaacttatttgtatgagataaatatgtattgaagaagaagtgttattaatttggaaaatactggtcaaagatgggagctcttaaaagcgttattgtattttttagtcaatacaaatagattgccgtaataataatcgtacttgatggttaaaaagttacttaaggctataaagcaaaactttttatatgagcagtcgaatataacgtttaaaatgattgtttttggatataaacgattaagtaaaatgctttttcagtttgaaattaatcatataaatttcttatgggaaggttgatatcttaatgattaatattatttcagctataggatctattggaacatttattatggctttattttattttgtatcagtttcagttcaactttatcaaatgaaaattagctttctgccagctttaggttttaaccaaattttattagaaagggaggaggatcaacttaatataatgaattcggcaacagaagagcatcatcataaagattatattaaactatataatttaggtggcggtgctgctaaaaaaattgcaatagaggttttattgggtaatgataaagtcattcagaaaaaatacgtgaatattttacctagtaaagaagggtacatgttaccaattaataaaaatgtgtacgaagaattagaaagaacgattgagaacaatggttatgaagctgatttgaatgtacgtatgacttattatcataatgtaagtcgcaaacaacaggaagttatattaaaaggtcaaatcgaccgttttaatacttataataataaagaaatttatgatttgcagtttatctaaaaattgatttaagagggtagttgtttattgcgaaaaatatcattcaattttaatgaaataatggcgtcattactataaaatattactttatgttgtaatgcatttttctataagatagaactaaaaggaggggcaaagatgcaaattagacaaatacatcaacatgactttgctcaagttgaccagttaattagaacggcatttgaaaatagtgaacatggttatggtaatgaatcagagctagtagaccaaattcgtctaagtgatacgtatgacaataacttagaaatagtagctgttcttcaaaacgaagttgtagggcacggtttactaagtgaagtttatcttgataacggagcacaacgggaaattggattagtgttagcacctgtatctgttgatattcatcatcaaaataaaggtattgggaagcgattgattcaagcattagaacgagaagcaatattaaaaggatataattttatcagtgtattaggatggccgacgtattatgccaatctaggatatcaacgcgcaagtatgtacgacatttatccaccatatgatggtataccagacgaagcgtttttaattaaagaattaaaagtgaacagtttagcgggaaaaacaggtaccataaattacacatctgcttttgaaaaaatatgatttcaagctaggattacattaggcagagttcatattaataatataaattgtttgcaatgaaatcgtacgttgtcgtttgcaatttataaaatagcaataaataaaatgtttgttaggaaagtattattgtggataataaaaaatcgatacaaattaattgctataatgcaattttagtgtataattgcattaatggagattaaatatatctttaaagggtatacagttaatataaaatgactttttaaaaagagggaataaaatgaatatgaagaaaaaagaaaaacacgcaattcggaaaaaatcgattggcgtggcttcagtgcttgtaggtacgttaatcggttttggactactcagcagtaaagaagcagatgcaagtgaaaatagtgttacgcaatctgatagcgcaagtaacgaaagcaaaagtaatgattcaagtagcgttagtgctgcacctaaaacagacgacacaaacgtgagtgatactaaaacatcgtcaaacactaataatggcgaaacgagtgtggcgcaaaatccagcacaacaggaaacgacacaatcagcattaacaaatgcaactacggaagaaactccgttaactggtgaagctactacggcaacgaatcaagctaatacaccggcaacaactcaatcaagcaatacaaatgcggaggaattagtgaatcaaacaagtaatgaaacgacttctaatgatactaatacagtatcatctgtaaattcacctcaaaattctacaaatgcggaaaatgtttcaacaacgcaagatacttcaactgaagcaacaccttcaaacaatgaatcagctccacagagtacagatgcaagtaataaagatgtagttaatcaagcggttaatacaagtgcgcctagaatgagagcatttagtttagcggcagtagctgcagatgcaccggcagctggcacagatattacgaatcagttgacagatgtgaaagttactattgactctggtacgactgtgtatccgcaccaagcaggttatgtcaaactgaattatggtttttcagtgcctaattctgctgttaaaggtgacacattcaaaataactgtacctaaagaattaaacttaaatggtgtaacttcaactgctaaagtgcctccaattatggccggagatcaagtattggcaaatggtgtaatcgatagtgatggtaatgttatttatacatttacagactatgttgataataaaaacgatgttaaagcaacactaactgttcctgcatacattgatccagaaaatgtaacgaaaacaggtaatgtaacattgacaactggcataggaaccaatactgctagtaagacagttttaatcgactatgagaaatatggacaattccataatttatcaattaaaggtacaattgatcaaatcgacaaaacaaacaatacgtatcgtcaaacgatttatgtcaatccaagtggagacaatgttgtattaccagtgttaactggtaatctaattcctaagagtaatagtaatgctttaatagatgccaacaatactaatattaaagtttataaagtggataatgctaatgatttatctgaaagttattatgtgaatcctagcgattttgaagatgtaactaatcaagttagaatttcatttccaaatgctaatcaatacaaagtagaatttcctacggacgatgaccaaattacaacaccgtatattgtagttgttaatggccatattgatcctgctagtacaggtgatttagcactacgttcgacattttatggttatgattctaattttatatggagatctatgtcatgggacaacgaagtagcatttaataacggatcaggttctggtgacggtatcgataaaccagttgttcctgaacaacctgatgagcctggtgaaattgaaccaattccagaggattcagattctgacccaggttcagattctggcagcgattctaattcagatagcggttcagattcgggtagtgactctacatcagatagtggttcagattcagcaagcgattcagattcagcaagtgattcagattcagcgagtgattcagattcagcgagtgattcagattcagcaagtgattcagactcagcaagtgattcagattcagcaagtgattcagactcagcaagtgattcagattcagcgagcgattcagattcagcgagtgattcagattcagcgagtgattcagattcagacagcgattcagactcagacagtgactcagattccgatagtgactcagactcagatagcgactcagattccgatagtgactcagactcagacagcgattcagattcagatagtgattcagattcagatagcgattcggattcagatagtgactcagattcagatagcgactcagattcagatagcgattcagattccgacagtgactcagattccgacagcgattcagattccgacagtgactcagactcagacagtgattcggattcagatagcgattcagactcagacagtgactcggattcagatagcgattccgactcagacagtgactcagattccgacagcgattcagattccgacagtgactcagactcagacagtgattcggattcagatagcgattcagactcagacagtgactcggattcagatagcgattccgactcagacagtgactcggattcagatagcgattctgactcagatagcgattcagactcagacagtgactcagactcagacagcgattcagattccgatagcgattcagattccgacagtgactcagacagcgattcagactcagacagtgactcggattcagatagcgattctgactcagatagtgactccgacttagacagcgactcagattcagatagcgattcagattccgacagtgactcagattcggatagcgattcagaatcagatagtgactccgactcaggttctaacaataatgtagtgccgcctaattcacctaaaaatggtactaatgcttctaataaaaatgaggctaaagatagtaaagagccattaccagatacaggttctgaagatgaagcgaatacgtcactaatttggggattattagcatcattaggttcattactacttttcagaagaaaaaaagaaaataaagataagaaataagtaataatgatattaaattaatcatatgattcatgaagaagccaccttaaaaggtggcttttttacttggattttccaaatatattgtttgaatataattaataattaattcatcaacagttaattattttaaaaaggtagatgttatataatttggcttggcgaaaaaatagggtgtaaggtaggttgttaattaaggaaaattaaggagaaaatacagttgaaaaataaattgctagttttatcattgggagcattatgtgtatcacaaatttgggaaagcaatcgtgcaagtgcagtggtttctggggaagagaatccatataaatctgagtcattgaaattaaatgggaaaagaagcactacaataactagtgataaatatgaagaaaatttagatatgttaatatcgtcattatcatttgcagattatgaaaaatatgaggaaccagaatacaaagaagcagttaaaaagtatcaacaaaaatttatggctgaagatgatgcattaaaaaaattttttagtgaagagaaaaaaataaaaaatagaaatactaatactaatactaatactaatacatcaaattatctggggttaacacacgaaagatatgagtcaatttataattcattaaaaaaacatcgtgaagaattttcaaaagaaatcgaagaaattaataataaaaatccagagttaaaagaatataacaatgaggaacaaactaaagctgatacggaattaaacactcttgaaaatcaagtactaatgataggttatacattttatcactcgaataaaaatgaagtagaagatttatataacaaattagatatgattcttggttataaagatgaagagagaaaaaagaagagggctaccaatcaaagaatgttcaataataaaaaagaggatttagaaactattattgatgaattctttggagaaattggacaacaaaggccaacatctataccaacattagcgcctaaagaagagaaagaaacaaatactaataatgctaataaattaaagtatgacactgaagcagcaaaaactgacgaatcaaaaagaagtaatcgaagtaaaagaagtttagattctcaaaattataaatctgtttcaaaagaagtaactgcagagcaaaaagctgaatatgaaaaaagagctgaagaaagaaaagcaagatttctagatagacaaaaaagtaaaaaagaaccggttgtatcattagaatacgattttgaacacaagcaacgttttaataacgcaaatgacaaacaacttgttgtttctgcaccaacaaagaaaccaacaacaccgactacatatactgaaacaacgactcaggtaccaatgcctacagttgagcgtcaaactcagcaacaaatcgtttacaaaacaccaaaaccattagttggattaaatggtgaaagtcatgatttcacaacaacgcatcaatcaccaacaacttcaaatcacacgcataataatgttgttgaatttgaagaaacgtctgctttacctggtagaaaatcaggatcactggttggtataagtcaaattgattcttctcatctaactgaacgtgagaagcgtgtaattaagcgtgaacacgttagagaagctcaaaagttagttgataattataaagatacacatagttatagagaccgattaaatgcacaacaaaaagtaaatacattaagtgaaggtcatcaaaaacgttttaataaacaaatcaataaagtatacaatggcaaataattaatgcatggctgcaaagcaaataatgagtttgtcgaaaaaataataacattttaaactagcaataaataatatctaagttatcatttcaatgatgcaatctagtatagtccacattctaaacaggtgtggactattacttttttcactttatattacgaaaaaattattatgcttaactatcaatatcaataattaattttaagctgaaaaacaataaaaatgttaagacaacgtttacttcaagttaattattatactgaaaattctggtatataatgctgttagtgaatataacaggaaaattaaattggttataatattgagtctatataaaggagaaataacagatgaaaaagaaattattagttttaactatgagcacgctatttgctacacaacttatcaattcaaataacgctaaagcatcagtgacagagagtgttgacaaaaaatttgtagttccagaatcaggaattaataaaattattccatcttacaatgaatttaaaaaagcaccaaaagtaaatgttagtaatttaactgacaataaaaactttgtagtttctgaagacaaattgaataagatttcggatccttcagcagcaagtaaaattgtagataaaaactttgccgtaccagaatcaaagttaggaaacattgtaccagagtacaaagaaatcaataatcgcgtgaatgtaacaacaaacaatccagcttcacaacaagttgataagcattttgttgctaaaggcccagaagtaaatagatttattacgcaaaacaaagtaaaccaccacttcattactacgcaaacccactacaagaaagttattacttcatacaaatcaacacatgtacataaacatgtaaatcatgcaaaggattctattaataaacactttattgttaaaccatcagaatcgcctagatatacacatccatctcaatctttaattatcaagcatcattttgcagttcctggatatcacgcgcataaatttgttacaccagggcatgctagcattaaaattaatcacttttgtgttgtgccacaaataaatagtttcaaggtaattccaccatatggtcacaattcacatcgtatgcatgtaccaagtttccaaaataacacaacagcaacacatcaaaatgctaaagtaaataaagcatatgactataaatacttctattcttataaagtagttaaaggtgtgaagaaatatttctcattttcacaatcaaatggttataaaattgggaaaccatcattaaatatcaaaaatgtaaattatcaatatgctgttccaagttatagccctacacactacgttcctgaatttaagggtagcttaccagcaccacgagtataaaaattggcactaagtttacgagatatgataaatacctattattttaaatatagtctacaatctatgtggttgtaggctgtattttttgcagtttatcaataaacacccatcaacaaattataccgtttttctactttgaaagttggaagtaacataatcttaaataaatatattattaattaagataaatataatactcaagattattgttaatagtttgttcatcgcaagttaattattgtttctaaaatattggtatataattttcaatggcgaagaaaacagggtgaaaaagtcggtttttatatcaaagcaaataagggagcataaacaaatgaaaaggaaagtattagtactaacaatgggtgtaatttgtgcaactcaattatggcattctaatcacgcaaacgcattagtaacagagagtggcgcaaatgatactaagcaatttactgaaattgtatcggaagagaaagttataacagttgaacatgctcaaattaatatttttcaatctaatagcaattcaaacttgatggagttcaacatattaacaatgggcggtaaatcaggagctatggttggttatagtgaaattgactcatcacatttcacagaccgtgacaaacgcgttattagacgtgatcatgttaaagaagcacaaagcttagtagagaactataaagatacacaaagtgctgatgctaggatgaaagccaaacaaaaagttaacacattaagcaaaccgcatcaaaactatttcaataaacaaattgataaggtttataatggattacaacgctaatccaaagtaaattataagttatacatctcgtttttaaatgacaatttatccccgtaaatattataaataatcttttcaaattccacatagatatagagacactaataaacctctttgtctcgatatgatagtctgcaacgattcatgttgtaggctttttaattttacaaataaggctaaatatataagttctggcacctaaaatatagaaaatacataaaagtaagtatagttattttattataattattaaatttttattaattaattgtaaaaatgtagaattataattaattaacgtttaatattaaaattaactaaaaagaaagaggtgttagttatgacagaatacttattaagtgctggcatatgtatggcaatcgtttcaatattacttatagggatggctatcagtaatgtttcgaaagggcaatacgcaaagaggtttttctatttcactactagttgcttagtgttaactttagttgtagtttcaagtctaagtagctcagcaaatgcatcacaaacagataatggcgtaaatagaagtggttctgaagacccaacagtatatagtgcaacttcaactaaaaaattacataaagaacctgcgacattaattaaagcgattgatggtgatacggttaaattaatgtacaaaggtcaaccaatgacattcagactattattggttgatacacctgaaacaaagcatcctaaaaaaggtgtagagaaatatggtcctgaagcaagtgcatttacgaaaaaaatggtagaaaatgcaaagaaaattgaagtcgagtttgacaaaggtcaaagaactgataaatatggacgtggcttagcgtatatttatgctgatggaaaaatggtaaacgaagctttagttcgtcaaggcttggctaaagttgcttatgtttataaacctaacaatacacatgaacaacttttaagaaaaagtgaagcacaagcaaaaaaagagaaattaaatatttggagcgaagacaacgctgattcaggtcaataatgctcattgtaaaagtgtcactgctgctagtggcacttttataatttttagatcacgatatgatttattatcaattcagaattaaaaaagtaaatagtatcaaaagtaagtgtatttaatattagaaaataaaaattttaaatttagtattaaaatggaatgttactatatagttcaatgtgtattatcacagaaaataaaataatgctttacttctatatttaaaagtgtataatgaaagttaagtaataaagagcgtgaagaaaaatgtgagttatttatatagaatattctccttttcatttatgaatttgttacaaaatatttagtgcaaaagcacgacggaggtattcaatatgaataacggtacagttaaatggtttaatgcagaaaaaggttttggtttcatcgaaagagaagatggtagcgacgtattcgtacacttctcagcaatcgctgaagatggatacaaatcattagaagaaggccaaaaagttgaattcgacatcgttgaaggcgaccgtggcgagcaagctgcaaacgtagttaaaatgtaattttaacttattcaaacagtccttactatagggctgtttttttatgctttaaatcgataacagttggtgtggtaaaagcactagctgttatttttttgtccaataaatataggtggagatctaacaatatataatggttctaaaataaatcgaactgatggaaaagttttttacttttcatctgtccgacttttgattttgaataaaaaaagcgccaatacagaactttaataatgacgagaattaaagtctgtatatggcgataacaagaagtaatgttaaacactcaaaatgtttaacaataataggataccacatcgcataatatcttactacttaattaataatttaactaatcaactttttgttaattttttattaagactgattaattattgagaatatttattgtttttaaaatctcataataattcagtaatcttgttttcatttaaaaggcgggacattaaaataattaaataaaaatattgcgtttaatttacagcgtcaaatatacttatttctaatgctttggggtctactgaaacaagtagagaatgatcgatgttactaacattgccattctccaaatctatttctgtgagtatttggaagctaccattaggcaatggtttaacaatagacaattgcttttccgcttgttgtattaaaaaaggttttgtagattgattattaatatgccattcactcatgtatgtttttcactcctgctttaaaatagggttaaaaagtttatagttgagacattcatgttcaaccaaaattttgttcaaattcaataaatgtcttgtttaaaatagaaatattgtaaatgttatcgtccaaaatttcaccagttaagtatttgttttgaattaaaatttggcagttagttaagaagtcttgataatcacgatcgcaaaaatagttttcacgtgcatctttagcatcgccaaaaaagttagcgactgtttctgtttctcctttattcgaacgttcaatatataatttgtaaaatttagctattgtatacttttgttctttagttagttcattcaaaatattgggcctcctgaaatatcatttgtaatctatacccaatttattgcaaaacacaaactaatttaactatttgatgaaactgtgttaataagctttaacaagccttagtttgtatggatctataaaattatctttaattgcatagggtgaaataatatgtagtccataacttttaactgatttttcacttacaccaaatttataagcttgatagataattttagtacaatacgtaaattttttgctgttcaaatttaatgtaactagataacgatgatttgtattttcatagtttttcttaacccagtcagccgcttttttacctgcaccaggatagctgcaacgataaactttcatccaatcatttttgccacttgcataattatatttaaaagattcgaaggattgtgtagttggtttgtcgccaggcccctcaatttgtaaaatcgttttatcatcaatcgcgatactacaatgaccaaaaaatccccacatgacagggccttttgtaacaataatatcaccaggttgtaattggaatttgtcatcttgaatttctgaatacttattatctgcaattgtttttggtgagtttataggggatacgacaacgaataatataagtaaaattatcgttcgtttaatatagttcacttaaaagctccttgttgaagaaatatatgtaaatagtcttaaattagaattgtaatctttaataagcttgtaagactaaaacataccttaaatattaaagtatgagagtgtgaaatgtctattaagaataaaaaacagtctgaaacatcattgagacgcttcagactggatataaaatgaatttcatttatagcacaccaaatataaatgtgtatattaatatagcgaatccaaaaatatagagaatgacagtgaaacttaaataggactcttttttagattctttgccagtttttttcattaatacgagtataaacgtagcggcaactaagaaaattaatgctagccaaaacagaattgcaaaatgtaaagacatgtgaaaccctccttatataccgtaattattaacctataaaactataaaaaataggataaatgtaatatagaacgagtacgatatttataaaaaataatatttcacttaaccagtttttagttatcattgcaatggtaaaggatacgatgagtatcacaccacaaatgataataccaggcaggagccaacataaatcatctaaatctttattatatgtgattaaaatattaaagataacaaaagtggtagtaataactatattgatagcatttaacaaaatgttattcatgactgacacctactagtataaaaatagcttcttaataaatatgataacactattttccaataggtaaataaaaagtatagttatttttaaaatattatttgtagaatgctaaagtttattaattcaaacaagtgagcatatataggggtgtatagtattaatatgaaaagaatatttacatactaaaaactcttaaagttgtataattcgttaatatttttagaatcagatatcaaaaaaatgtgcaaaatcacttttgcacatttacaaatactagttttctgataagattaataataacactttaaatagcgcttaataaaagaagggggcaagtcttatgacgttttacaatttcatcatgggttttcaaaatgataacacaccatttggtatattggccgaacacgttagtgaagataaagcattccctcgattagaagaaagacaccaagtaattagagcatatgtgatgtctaattacacagatcatcaattaattgaaactacaaatagagctattagcttatatatggcaaattaatttgagtagtaccaattatgatgtattagtgcatcccaaatatcttttgttttaaagtttatttcatcatttcttatcgaaaatggtgtaataatgtctttatctaaccaagtgttgataagttcatttggtacaccatctaacaacatttcacttttactaattataaaacattcccagtcaagtgaaacattttgtggattcacataattacattgattatgattatccataaacactcactcctttaaaattctgtactcttcattgcgttttaccccgtcacattatcttttaaactaaaatcatcattacttatgaaaaaaatgtacatcaaaagcaaaggttttcgctaccgaaaaagtttaaataatggtttaatatatttggtactcattttaataaaaagagaatacattttgagctatcaatactttttattgaagaggtgttattgttggctaaaacgttatatttaatgcgccacggacaaactttgtttaattttaagggactaattcagggatttggagattcgccgctaacagaacttggaattgctcaagctcaaaaggcacgtagttattatgaaactaaggggataaacttcgatttatatgcatcatcaacgcaagaacgcgcaagtgacacacttgaaaatgttgcacctaaccaatcgtatcaacgttttaagggactgaaggaatggcattttggattatttgaaggtgagtcagtctatctatttgataatctatacaagcctgaggacttattcggagatcgaattgttcctttcaaaggagaggcaaggcaacaagttgaggaacgcattgtgaaaactttacatgacattatgtctcaaacaaagaataatgcattagtcgtgagtcatggaacaataatgggagtatttttaagatattgccttaaactagatgaagcattaaagcataatatcggtaattgtaatatcctgaaatttgaatatgacaatggaacatttaaatttgttgagttaattgatccaaatttataataaataaagcgttatacatagacacaagtatgttttttgtataacgcttttaaaatacaactataaaacgctttagaatattaattgaataagtttttgtaatatcattagagcaacaataataattattatgcttgatattttattgattattgttaataattttccggttttatcaattgatccaaccatttttcctaaaattgcgagtaaaaagaaccataaccatgaaacgctaatacaagcgattgtaaacgcaattttattgctgccactatataatgcagcactactaccaattacaccaattgtatctaaaatagcatgtggattgagtaatgaaactgataaagcaaaacttacttgtttcattggagacataatttgagcttctccatctgttgagggtttatcatgccaaatggtccaagccatatacatcaagaaaattaaaccaactatataaataattgcttgaagtacaggtaaagacataataatgatagatactcctaccactgcaataataataagtaagctgtcagacaacccggctgtaattattgcaggcaatacatatctatattttggttgattagctccttggttaaaaataaatacattttgtgcacctaaaggtaaaattagaccaatcgctaagataaatccatgaataattgcggttaccattaagttttgacacccctaaaacatagaatattctgaaaaaacttattgatatcataccaaataaaaaacaactactcaatagtagagtagttgtatgaaaaatagattaatatatgatttgaatttatgagaaatgtagaatatataaaactgtattacttattaatcaaatcataaaaaagccaatgttcatcgaaataggtatttccgattttaattgcatttttctcaaaaccaagaatgtcgaatcctagtgcactatagaaaactttagcacctatgttgtttgacacaattgatgtaagtaaagattcgtaattgttctgccgtgcataattaataatgaaattaatgagctcgctattaatcgatttatcgttattagtaacaaagttgtatttaattaatgatttatgttcttttccaacgtatcgaatttgttctaaggcagctgttgcgataagtgtttcgttttcataacagccaaatacaatacatttcggtgaaccttgatttaaaatgtcatgtattaaggtgtcagtcattgtttgactataatgtgaatcttgagtgaattcttcattgactgtcgaaacaagtctcttatactcattaaaatcattattcgttaatgttttaatttcaatcattactgacctccttaatcattattaagaaagattttgtactaaaaaaatttcttaattacatattaaaatgtttattaaaattttgcaatcactgatttatatgcacattcttgtaaatggattatcaatttaattatatttatttttaagttcaggaaattatggaattggttattggtcgacactggacttttatttgtagacggtatgcgaagaagtcaagccagtattggaaccggtcacattcatgatgactaagggacaatcattttcagttaaatattgccagaaatttcaatcacgaatagaaaaaataaccaaccaaaaatttttggttggcaaatttgaattttatgtgaattttattaataaagttgaataatctctttaagttaatgctaatctacaacatttacatttaaatcgacattaatatttccttgagtcgcttttgaatatggacaaaattcatgagccatttgtaaatatttttcagcttcttcttgagatataacatttttaattgttgcatcaattgaaacacttaatttaggactttctgagtctgaatcatcttctagtctcactgttagtgttacttctggatgagcatcacgcactttgttttgctttaaaattaggtcgaaggcaccgttgaagcaagatgcataacctgctgcaaataattgttcggggttagtagctttaccatctgcttgagcaggcggaacgatatcaatatctaacgttcgatcatcagtataaacatgtcctttacgtccgccaacattcgtcgctttagtttcataatgtattgccatacttataacctcctaatttaaaatacatttatgctttacccattcgaaaataccttaatcattttcatttatagcattgtttgattgaaggataaaaagttgttgtttacaataaaaataatgagtatctgaaatgagggattcactatgacacatgtggaagtagtagcgactatcgcgccacaattatctatcgaagaaactttaattcaaaaaattaatcatcgtattgatgcaatagacgtattagaattacgaattgatcaaattgaaaatgtcacagttaatcaagtggcagaaatgattacaaagctgaaggttatgcaagattcattcaaattattagttacgtatcgtacaaagttacaaggtggctatgggcaatttacaaatgactcgtatcttaatttaatatcagacttagcaaatatcaatggtatagatatgattgatatagaatggcaagcagatattgacattgaaaaacatcaacgaatcattacacatttgcaacagtataataaagaggtggttatatcacatcataatttcgaaagtacgcctccgttagatgaattgcaatttatattttttaaaatgcaaaaattcaacccagaatacgttaaattagcagtaatgccacataataaaaatgatgtgttaaatttattgcaggcaatgtctacattttcagatactatggactgcaaagttgttggtatttcaatgtctaaacttggactaataagtagaacggctcaaggcgtttttggtggtgcgttgacttatggttgtatcggagtaccacaagctccaggacagattgatgttactgatttaaaagcacaagtgactttatactaataaaatgaattaggttgcttttgtgtaagtgctgtcttataattgagaagtattatcattgttcgtggaggagcgattttagatggaattacaacaagcaatagctaatagaagaagtgtgaaaaaatttaaaagagatatgcacatagatgacgcattgctatatcaagcaattgagaaagctgctgatgctccaaatcacggaatgagggaaccatggagagttgtgcatgttccgaaagacagattaggagatatgagtaaggatatttctaaatttgcatttcctaatgaattagataagcaacaatgtcattatgatgcagttacgaaactaggtggcatgttattgcttattttaaaaacagatccaagacaacgtcaaaatgatgaaaactactttgcatttggtgcatatgcacaaaatcttatgttgttactttatgaagcgggaataggtacatgttggaaatcgccattatatatctatgatcctaaagtaagaaaaacacttggtataaagaaagatgaagttcttgctggattcttatatttaacggatttagaagaagatatgcctaaagcaccacgtaaaaatagaaacttaattacattatattaatatgtataattatagaaacattaataaaagctgagtcatgaattgatggacatctatcgagttagagatttaatctaacttattagagtcggtacaatcacagtctcagctttttattgtgcagtatatacacatttttattttagtatttatttaaaagtttctgctaaaaatgattcaacttgatcaggtgacttagcatttgctgaatgaaggtgtgcaattttgtcgccgtttttaaatactagcaagctagggatacccataacttcattttcaacaactacatcctctaattcatcacgattaacagtataccattggtaatcattatattgttctacgattgggtcaatccataaatccatagcacgacagtctgggcaccatcctgcctcaaatttaacaattacaggtgtatcgctattaattacagatttaaatgattcattacttttgattgattgcattgtaacaactcctctagatagtttaataatttttattatagctaaatttatatcataataaaaaattttagcttcaaaatgaaagccttttgctatggaaaatgatatatttattttaaatacataaaggaggttgcagtcgtatgattaaattttaccaatataagaattgtacaacttgtaaaaaggcagcaaagtttttagatgaatatggcgtaagttatgaaccaattgatatcgttcaacatacacctacaataaatgaatttaaaacaataattgcaaatacaggcgtagaaattaataaattgtttaatacacacggcgcgaaatatcgtgagcttgatttgaaaaataaattacaaactttatcagatgatgaaaagttagagttgttatcatctgatggtatgttagtaaagcgtcctctagcagtaatgggcgataagataacattaggatttaaagaagatcaatataaagagacttggttagcgtaagtgaaatgtaaacgtttactaaatatctcgatatttagattcattacatgtaaaatgaaataagctatacaattgttaatttttataaatatagttgaatagcatctagccttatggcatcattaatgatgtaaagattaattaggaggggattctcttggcagtaccaaatgaattgaaatattcaaaagagcatgaatgggttaaagttgaaggtaatgtagcaacaattggaatcacagaatacgcacaaagcgagttaggtgatattgttttcgttgaattaccagaaacagatgatgaaattaatgaaggggatacgtttggtagcgtagaatcagttaaaactgtatcagaattatatgcaccaatctctggtaaagtagttgaagtcaacgaagaactagaagatagtcccgaatttgtaaatgaatctccatacgaaaaagcatggatggtaaaagtagaaattagtgatgaaagtcagattgaagctttattaacagctgaaaaatattcagaaatgattggtgaataatcaccgtgtaactccttaatctaagattgaggagtttatttttagtctgagtaagtaaataatatgaaagaaaatttattaggtactattatttggagtattgctacattttattattcaagaatgatgaaaataatgaatttagctattttaaaaataaaaattgggggaagttaatatgctaaacattcaagacgttagtcatctttctaaaaaggagcaaaaagcatataaccgtttcgtagaatctgtagaaaacggtaatttaccagtactaccatgtattgaaatggatctaaaagagatgaaagaagaaacattaaaccagagtaagattggtggaatgccatttttaaaatcttttaaagatataccattagatgaaaataatgtaccaatggtattgttagcacagattaatttggataatcttccagaacaacaagaattatttcctgtaaaagaagggatattgcagttttggattagttcagaagatcaaatgtatggtatgtctgaaaatttaaagggaaacaatataaactcaaggcttgtttatataaaagagccaattacagatttatctctcgaaaatattcaagcgcatttaaagtcattagatgctgataatgaggatatcccgttcagtggagcattttctatagaatttagattgtcgaaacaaactattacatgtactgattataagtacgatgaggacgtgcttgcattgtggaataaagtcaatccatccttcgcgctaaaatcaatgtttggtggttatgatgaattgatggaacctgtgtgtaacacatttactgctaaggaaccatttaatcaacttggtggttatccatattttgaccaaatagatccaagaacgaacgatcaagaactgaaaatgtatgatagagtcttactgcaaattgattctacaagagatggtaattcttcgattatatggggtgatttaggtattgccaatatcttagtaaaatctactgaccttgaggctatgaagtttgatgattacatgtattcatgggattgcagctaagagaatcataaaaatatattactttaataagtgtagtatctatagatcaatctagggagtgggacagaaatgatattttcgcaaaatttatttcgtcgtcccaccccaacttgcattgtctgtagaaattggaagtccaatttctctgtgttggggccccgctatgattgaaaagtttgttataggtgtattttcttttggttaactattggtaatacaacattgtagattttaggatgttgatttttgacttagcctttgtctgcttatgttaaatgttacagctagtcaaacattgagtttgtaattattatattaagctagtttaaattttttgtgatttatgttttattcataccaattttgtgaaatgatacagtgacagatgtttattgattttaaagggtgatgatgatggctattgtaaataaagtgataattgttgaaggaaaatctgataaaaaaagggtgcaacaggttattgcagaaccagtcaatattatttgtactcatggaacaatgagtatagataagcttgatgatatgatagaatcactatatgataaacaagtttttgtattagccgattctgatgacgaaggagatcgaattagaaattggtttaaacgttatttgagtgaaagtgaacatatatttattgataaaacttactgtcaagttgcgaattgccccaaacaatatttggcgcatgtactttcaaaacatggctttacttgtaagaaagaaacacctcttttaccgaatataaataatgaaaggttagttttagtaaatgaataattcattagacatcaaagatgtaactacattttatgaggaagacaaacatttaatctttggttatacaccaacgtgtggtacttgtaaggtttcagaaagaatgttagacattgctaatgaaatattgcagttaccattattgaaaatagatttaaacttttatcctcagttttgtaaagatatgcaaatcatgtctacgccgattttattgttgatgaataaagataaagaagtaaaacgaatttatgcatttaaatcggtgactgatttgttagaaaatttaaaatagttattgacgaaattttactaaggtgttaggattaatacaaattaaatgatgcgtaaactcttatcgagagtggtggagggatgtgccctacgaagcccggcaaccgtcttatatagaaatggtgccaattcacataaagttttaacttttgaagatgagagaaacaatactactattgctttctcaatttttctatcgatattgagaaagcattttttattttattaagcaacacagggaggaatcaacgtgattgaattaaaagaagttgttaaagaatatcggactaaaaataaagaagtccttgctgtagatcacgttaatttatcgattcgagcaggatcgatttatggcgtcattggtttttctggagcaggaaaaagtactttgattcgaatgtttaatcatttagaagcgcctacatcaggcgaagttattatagatggggaccatataggtcaattgtccaaaaatggattaagagcaaaaagacaaaaagtaagtatgatcttccaacattttaatttgttatggtcaaggactgtgttaaaaaatattatgtttccgcttgaaattgcaggtgtccctagaaggagagctaagcaaaaagcattagaacttgtcgaactcgtcggtttaaaaggtagagaaaaggcttatccatcagagttatcaggtggacaaaagcaacgtgttgggattgcacgagcgttagctaatgatccaacggtcttgctttgtgatgaggcaacaagtgcacttgatccgcaaacaacagatgaaattttagatctactactaaaaattagagaacaacaaaatttaacaattgtactaattacgcatgaaatgcatgtcattcgtcgtatttgtgatgaagttgcagttatggaaagtggtaaagtgatagaacaaggaccggtgacacaggtttttgaaaatccgcaacacactgtgacaaaacgatttgtgaaagacgatttaaatgatgatttcgaaacatctttaacagaattagagccattagaaaaagatgcttatatcgttagattagttttcgctggttcaacaacaaccgagcctattgtatcgagtctatcaactgcctatgatattaaaattaatattttagaagcaaatattaaaaatacaaaaaatggaacagtcggctttttagttctgcatattccatatatttcaagtgtagatttcggaaaattcgaaaaagagttaattgagcgacaagttaaaatggaggtgttaagacatgggtaaatcatttagtgaaattataaatgaaatgattacaatgcctaatattcagtggccagaagtttggactgcaatagtcgaaacactatacatgacagtcgtctcaactatatttgcatttatactcggtcttattttaggtgtgttattattcttgtctgctaaaggtaagtctatcggtgcaaggttattttattctatcgtttctttcattgttaacttatttagagcgataccatttattattttaattttattattaattccatttacaagtttgatacttggaacgataagtggtccgacaggtgcgttaccagccttgattattggcgcagcgccgttttatgcaaggctcgtagaaattgcttttaaagaaattgataaaggtgtcatcgaagcggcttggtcaatgggtgctaatacttggacagtaattcgtaaagtccttttacctgaagccatgccagcgctagtgtctggcattacagttacagcaatcgctttagttggttcaacagcagttgcaggtgtaattggtgccggtggtttaggaaatttagcatacttaacaggtttcactcgaaatcaaaatgatgtcattttagtatcaacagtttttattttaattattgtatttataatccaattcattggggattggcttacaaataaacttgataaacgataaattgggggtttcattttatgaaaaaattatttggtcttattttagtattaacatttgcagttgtattagcagcttgcggtaatggaagcaaaagtggcagtgacgacaagaaaataacagtaggtgcttcaccagcaccacatgctgaaattttagaaaaagcaaaaccattattagagaaaaaaggttatgaactagatattaaaacaattaacgattacactacgcctaataaattactagacaaaggtgaaattgacgcaaactatttccaacatacaccatatttaaacacagagaaaaaggataaaggttacaaaatcgtaagtgccggtgatgttcacttagaacctatggctgtatactctaaaaagtataaaagtttaaaagaattaccaaaaggtgcaacagtttatgtgtctaataatccagctgaacaaggacgcttcttaaaattcttcgttgatgcaggtttaattaagatcaaaaaaggcgtaaaaattgaagatgctaagtttagtgatattacagagaataaaaaagatattaagtttaataataaacaatcagcagaattcttacctaaaatttatcaaaatgaagacgctgatgctgttatcattaattcgaactttgcaatcgaacaaaaactaaatcctaaaaaagattctattgctgtagaaagtgcgaaagataatccttatgcaaacttaattgctgttaaagaaggacatcaagatgataagaaaatcaaagcattaattgaagtattacaatctaaagatattcaagacttcattaatgaaaaatacaatggtgcagttattcctgctaaataaatcatattaatggctcagtaacgtgatgttgctgggctttttaatttaaacaggtatttatatgatatttaggaatgagatgctattacggataaagtaaaatcctatatgcatgcgtgctactcatttattcttatttttaatttcacatggctagtgactaatacatcataaatcattagtgattctttattatttcagtcccactccctcaagttaatgatgaatctatttcgctagttataaaatgacgtcaaatcaatatcaaaaattatttaagtaaaatgtttagataatttttcagtgggtaagtattatatataacatttaattattccgaggaggcatttattatggcagacgaaagtaaatttgaacaagcaaaaggtaatgttaaagaaacagtaggtaatgttactgataataaaaatttagaaaacgaaggtaaagaagataaagcttctggtaaagcgaaagaattcgttgaaaatgcaaaagaaaaagcaactgattttattgataaagtaaaaggtaacaaaggcgagtaattttactttttattcctaatacactgcacatgccacttagtcggtataaccatcggctaggtggtttttgtattaaaaaagtggataccaaaatttattaataattattttaatgttagaaaaaaaactaaataaaaactcgctaatgatatccaataatatgtatacaaaatgagacatatattgcatatgattaacgagatactgaatatattttatcacccctaaaatgattattcattttcagcggtaattcgacctaaagtcaaacttacaataaaaccgatgataaatactactaatgaaacgaaccacatcacgatgttagttggtaaacctggaaatactgcaaagagggagccaacaacaaaaccaatgattaatgcaaaagtcattagtttatgatgtgttaggaaatactggataattttgcttgaaataatgaatccagcaagcacgccaaatccgactgcaagtaatataggaagaccggtaaagttaagtttaacaacttcagatattgctagcatgaccgtaccatagacgccaaatactaataacataaatgatcctgaaatacctgggagtaacatagcgctagatgcacacatacctgcaataaagtatttaataataagaccagttgatagagtaagtgtttctccagcatgtttatcgccattattcattaatgtaataacaattaagatagcgataccagctataaccatcatgtaatgtttagttgtaaatgacgttttatagttagaaattttcaataaatatggaacgataccaatgattaatccaccaaagaaaaacatagttggaatatggtgttggcttaataaataattaaaaagattacttagtgatcccattgccagtaacattccaattataatggggattaaaaatgtaaaacttggccaaaaacgtcgtgagaatatgccgctaattgaagcgataaattgattgtaaatacctaacaataatgcgatagtcccaccgctaacaccaggtaccaagtcactcgttcccatagcaaaaccttttagaatattaatccatttaaattgttgcatgaataactcctttcaaacgattggaataaaatcataaatagcatcataccatattacaaatgtcctagtgaaatgataacatattttaaattcataaaatccattgagaaattatgtgcacttattatcatttatatttttaaagagagaggattagagttgtactttagagttattaaaaataataaaaagggtttaagttgtttatattaaggtataagtaagttataattaactgaacgcattattacaaagtctttttgactacaaattaaaattattataaactagttaagaaaactttatattttacggagggaatataaaatggcatcaacattagaaatcaaagacctacatgtgtctattgaggataaagaaatcttaaaaggtgttaacttgacaattaacactgatgaaatacatgcgattatgggaccaaacgggacaggtaaatcaactttatcatctgcaattatgggacatccaagctatgaagtaactaaaggagaagtacttttagacggtgtaaatattttagaattagaagttgatgaaagagcaaaagcaggattattcttggcaatgcaatatccatcagaaattacaggtgttacaaatgctgatttcatgcgttcagcaatcaatgcgaaacgtgaagaaggacaagaaatcaacttaatgcaatttattaagaaattagataaaaacatggattttctagacatagataaagacatggcacaacgttatttaaatgaaggtttctcaggtggagagaagaaacgtaacgaaatcttacaattaatgatgttagaacctaagtttgcaatcttagatgaaatcgattcaggattagacatcgatgcattaaaagttgtatctaaaggtattaaccaaatgcgtggggaaaactttggtgcattaatgattacacactatcaacgattattaaattacattactcctgataaagtacatgtaatgtatgctggtaaagtcgttaaatctggtggtccagaattagcaaaacgtcttgaagaagaaggatatgaatgggttaaagaagagttcggttcagctgaataatcttattaatacagtatccatgagatgttcatctatatatgatgaaaatgaacatttatacgaaatagtaaatttcatcaagtaggaggaaaaagttatgacaactgatattttgaacatttctgaagaacaacttgttgattattctaaagcccacaatgaaccttcttggatgacagaattacgtaaaaaagctttgaaattaacagaaactttagaaatgccaaaacctgataaaacaaaattaagaaaatgggattttgattcttttaaacaacacgatgtaaaaggtgatgtttatcaatctttatcacaattacctgagtcagtaagagaaattattgacgtagatcattctaaaaacttagtaattcaacataataatacgattgcgtacacacaagttgatgataatgcatcgaaagatggcgttatcgttgaaggtttagcagacgctcttatgaaccatagtgatttagtacaaaagtactttatgaaagatgcagtaacagtagatgaacatcgtatcacagcgctacacacggcattagttaatggtggcgtatttgtttatgttcctaaaaatgtagttgtagaacatccagtacaatacgttgtgttgcacgacgacgaaaatgcaagcttttataaccatgttatcatcgttactgaagaaagcgccgaagtcacatatgttgaaaattacttatcaaatgcatctggtgaaggaaatcaattaaatattatttctgaagtgattgctggtgcaaattcaaatatcacatatggctcagtggactatatggataaaggctttacaggtcatatcattcgacgtggtattactgaagcggatgcctcaattaattgggcactaggtttaatgaatgagggtagccaaattattgataatacaacaaatttatttggtgatcgttcaacaagttcacttaaatcagtagttgtaggtacaggcgaacaaaaaatcaatctaacatctaaaatcgtacaatatggtaaagaaacagatggttatatccttaaacatggtgttatgaaagaacatgcatcatctgtatttaatggtatcggctacattaagcatggtggaactaaatcaattgctaatcaggaatcacgtgtattaatgttatctgaacatgctcgtggtgacgcgaatcctattttattaattgatgaagatgatgtacaagctggtcatgctgcatcagtaggtcgtgttgatccagatcaactttactatttaatgagtcgtggtatttctcaaagagaagcggaacgtcttgttatacatggtttcttagatccagtagtacgtgaattacctatcgaagacgttaaacgtcaattgagagaagtaattgaacgcaaagtttctaaataatattttgaaaataaaagtttgtaatagatatagactgtcgatattggtataagactaatacaacgtcagtatttaaatgattaggatttttatttaagaaaggtcgtgaatgaagtggccgaacactcatttgacgttaatgaagtaatcaaggattttccgatattagatcaaaaagtcaatggcaaacgtttagcatatcttgattcaacagcgacaagtcaaacgcctgtgcaagtgttaaatgttttagaggattactacaagcgttataattcaaacgttcatcgtggtgttcatacattaggatcattggcaactgatggttatgaaaatgcccgtgaaaccgttcgtcgttttattaatgcgaagtattttgaagaaatcattttcacacgcggaacaactgcatcgattaaccttgtagcacatagctatggtgatgcaaatgttgaagagggcgatgaaattgttgtcactgaaatggaacatcatgccaatattgttccttggcaacagttagcaaagcgtaaaaatgcgacattgaaatttataccaatgacagctgacggtgaattaaacatcgaagatattaagcaaacgattaatgataaaacaaagatcgttgctattgcacatatttctaatgtactcggtacaattaatgatgttaaaaccattgcagaaatagctcatcaacatggtgcaattatcagtgttgatggggcgcaagcagcaccacatatgaaacttgatatgcaagaaatgaatgctgatttttatagttttagtggtcataaaatgcttggaccaacaggtattggcgtattatttggtaaacgtgagttactacaaaaaatggaaccgattgagttcggtggcgacatgattgattttgtaagtaagtatgatgcaacatgggctgatttacctactaaatttgaggcgggcactccattaattgcacaagcaattgggcttgcagaagctattcgctatttagaacgcataggatttgatgcaattcataaatatgaacaagaattaacgatatatgcttatgagcaaatgtctgcaattgaaggaattgaaatttatggcccgccaaaggatcgtcgtgcaggtgtaataacgtttaatttacaagatgtacatccacacgatgttgctacagccgtagatacagaaggtgtagcggttagagctgggcatcattgtgcgcaaccgttaatgaaatggttaaatgtgtcttcaacagctagagcgagtttttatatatacaacacgaaagaagacgttgatcagttaataaatgccttgaaacaaacgaaggagtttttctcttatgaattttaataatctagatcaattatatagatctgtcattatggatcattataaaaatcctagaaataaaggtgtattagataacgggactatgacagtagatatgaataacccgacatgcggtgaccgtatacgactaacatttgatatagaagacggcattataaaagatgctaagtttgaaggtgaaggttgttcgatttcaatggcaagtgcatcgatgatgacacaagctgttaaaggtcattcacttggagaagcaatgcaaatgagccaagaatttacgaaaatgatgcttggtgaagactatgtgattacagaagaaatgggagatattgaagcattgcaaggtgtatctcaattcccagctcgtattaaatgtgccacattagcttggaaagcattggaaaaaggtactgttgctaaagaaggtaaagcagaaggtacgactgaagaagaatagaatgctgttaatcatagatgattttgatattagacatataaaagtataaaaatttttataagatgtcatgtcataatatggtttacatcatgaattaaaaacttacgcacgccgttgtaaatatatttttaaggagtgattgaaatggctaaaaaagcacctgatgttggggattataaatatggattccacgacgatgatgtatccattttcagatcagaacgtggtttaactgagaatatcgttagagaaatttctaacatgaaaaatgagccggaatggatgttagatttccgtcttaaatcattaaaattgttttataaaatgccaatgcctcaatggggtggcgacttatcagaattgaatttcgatgacattacttactatgtaaagccttcagaacaagctgaacgttcatgggatgaagtgccagaagaaattaaaagaactttcgataaattaggaattcctgaagctgaacaaaaatatttagctggtgtttctgctcaatatgaatctgaagttgtttaccataatatggaaaaagaacttgaagaaaaaggtattatctttaaagatacagatagtgctttacaagaaaatgaagaattattcaaaaaatactttgcttctgtagtacctgcagcagataacaaatttgcggcgttaaactcagcagtatggtcaggtggttcgttcatttatgtacctaaaaatatcaaactagatacgccactacaagcttatttccgtattaactctgagaacatgggtcaatttgaacgtacattaatcattgctgatgaaggtgcttctgtacattacgtagaaggttgtactgcaccagtttatacaactagttctttacactctgctgttgtggaaatcattgtgcataaagatgcgcacgttcgttatactacgattcaaaactgggcgaacaatgtatacaatttagttacaaaacgtacttttgtttatgaaaacggaaatatggaatgggtagatggtaacttaggttctaagttaacgatgaaatatccaaactgtgttcttttaggtgaaggtgcaaaaggtagtacattatctattgcatttgctggtaaaggacaagttcaagatgccggtgctaaaatgattcataaagcgccaaatacatcttcaacgattgtttctaaatctatttctaaaaatggtggtaaagttatttatcgcggtattgttcattttggacgtaaagcaaaaggtgctcgttcaaatattgaatgtgatacattaatcttagataacgaatcaacatcagatacaattccatataacgaagtattcaacgatcaaatatcattagaacatgaagccaaggtttcaaaagtttctgaagaacaattattctatctaatgagtcgtggtatttctgaagaagaagcgacagaaatgattgttatgggattcatcgaaccatttacaaaagaacttccaatggaatacgcggtcgaaatgaaccgtttaatcaagttcgaaatggaaggtagtattggatagctttaaaccgcgttgttaagccattcttgacttccgaaaatggctattgataccattttgataccattttgatactgaatataacaaaaagccacattactgtggctttttttgttttataactaaatcggattgatagataagctttgtacttatttatatcagtccgattttttgattggtgtaaaaaataatcattgatggtggataaagcgacaacacaaatacaacatgattgtggcattagagtgctggtctttattaaattaattgaaagctacatcaaatattctttagataattcgatattagttcgattaagattcgttgtataagtgagttaaaataagaaaactattaataatattaagttcactacagatgttgctaatggaccataagttttaaagacatcttcacttttataaccaacaatcgcatctaaaaattgaactaagatcattgcaatggatatagttatcaaaaatatagcactatgaatgactaaagaaaaaatagctaataaaaataaaggtaagcttcgactaagtgcataatatgcatttatattatggctagatgcacatgcttgaattgaataacctaaacttacactggcactgattattgtaaatattgctaaaacaaaatacatgttaatccttctttctatatttggatataaacaagtacttgtctaaagttatttaaaagataattagaataaatttatgagaaacttattgttatcattataatggtttcaaatcattataactatgtcataaactgaatttgttaaaatttttcattatgtaaatttattaataacaaacagctcgaactatagcatcattttactaatgaatgcattaaagtaactataactaaaaatgcatattaattatcattattaagactattatatataatgaattttaactggtttattaaacgagaacgtcgggaattaagtaactacaataaaaataagatatgacaataaggagactacacgcgtgatcattgccataattatattgatatttatttcgtttttcttttcaggaagcgagacggcattaacggctgccaataaaacaaaatttaaaactgaagctgacaaaggtgataaaaaagcaaaaggcattgtaaagttacttgaaaaaccaagtgagtttattacaacgattctaattgggaataatgtcgcgaatattttattaccaacacttgttacaattatggctttacgttgggggattagcgttggtattgcatcagctgttttaacagttgttatcatattgatttccgaagtgattcccaagtctgtcgctgcaacatttccagataaaataacaaggcttgtatatccaattattaatatttgtgtcattgtgttccgtcctatcacattacttttaaataagttgacggacagtattaatcgaagtttatctaagggccaacctcaagaacatcaattttcaaaagaagaatttaaaacaatgttagcaattgctggacatgaaggtgctttaaatgaaattgagacgagtaggttggaaggtgtcattaattttgaaaatttaaaagtaaaagatgtagatacaacacctagaattaatgtgacggcatttgcttcaaatgcgacatacgaagaagtttatgaaacggttatgaataagccatacactagatatccagtgtacgagggagatattgataacattattggagtgtttcattctaaatatctgttggcttggagtaataaaaaagaaaatcaaattacaaactattcagctaagccattatttgtgaatgaacacaataaagctgaatgggtattacgtaagatgactatttctagaaaacatttagcaattgtgttggacgaatttggtggtaccgaagcgatagtgtcacatgaagacttaattgaagaattattaggtatggaaattgaagatgagatggataaaaaggaaaaagaaaaactttctcaacagcaaattcaatttcaacaacggaaaaatcgcaacgtatctatataaggagcgaacagctatgtggaataagaatcgacttactcaaatgttaagtattgaatatccaattatacaagcaggtatggcaggaagtacgacaccgaaattagttgcatcagtaagtaacagtggtggattaggcacaataggcgcaggttactttaatacgcagcaattagaagatgaaatagattatgtacgccaattaacgtcaaattcttttggtgtaaatgtctttgtaccaagtcaacaatcatataccagtagtcaaattgaaaatatgaatgcatggttaaaaccttatcgacgcgcattacatttagaagagccggttgtaaaaattaccgaagaacaacaatttaagtgtcatattgatacgataattaaaaagcaagtgcctgtatgttgttttacttttggaattccaagcgaacagattataagcaggttgaaagcagcgaatgtcaaacttataggtacagcaacaagtgttgatgaagctattgcgaatgaaaaagcgggtatggatgctatcgttgctcaaggtagtgaagcaggtggacatcgtggttcatttttaaaacctaaaaatcaattacctatggttggaacaatatctttagtgccacaaattgtagatgtcgtttcaattccggtcattgccgctggtggaattatggacggtagaggagttttggcaagtattgtcttaggtgcagaaggggtacaaatgggcactgcatttttaacatcacaagatagtaatgcatcagaactactacgagacgcaattataaatagtaaagaaacagatacagtcattacaaaagcgtttagtggaaagcttgcacgcggtatcaacaataggtttatcgaagaaatgtcccaatacgaaggcgatatcccagattatccaatacaaaatgagctaacaagtagcataagaaaagccgcagcaaacatcggcgacaaagagttaacacatatgtggagtggacaaagcccgcgactagcaacaacgcatcccgccaacaccatcatgtccaatataatcaatcaaattaatcaaatcatgcaatataaataatcgaccgcaatccacaaaagcacaagcacccccaaacattattttagtgcttgccatttttgtggattgcgtttctattttaccaatctagtcaagcgaaatcatcaaacgaaagttcactgaaatgattatgatcaaacgaaatcatcaaacgaaagttcactgaaatgattataatcaaacgaaggttcgctgaaatgattataatcaagcgaaatcatcaaattaaagttcgctgaaatgattatgataaaagttatatggtatgatgacattggtgatatatatgataaacatcggattaacaggttggggtgatcactattcattatatgaagatttagaacgccaaaccgataaacttaaaacatatgctggacattttccggttgtcgaattagatgcgacatactatgcgatacaaccggaaagaaatatattgaaatggataaaagaaacgcctgatacatttgaatttgtggtcaaaattcatcaagcactcacattgcatgcagactacaaaacatttgcagatacaaggcaagaactatttgatcaatttaagaatatgttagagcccttacatacacagaaaaaattagcaatggtattggttcaatttccgccatggtttgactgcaatgcacaaaatatcaaatatattttgtatgtaagacagcaattacaagcatttccaatatgtgtagaatttaggcatcaatcatggtttagtgatgcatttaaagaacaaacattggcatttttaacagaacatcaaatcattcatgcagtagttgatgaaccacaagtgaaagatggcagtgtacctttagtcaatcgaatcacaaatgaaattgcgtttgtacgttatcatggacgtaatcattacggttggactaagaaagatatgtcagatcaagaatggcgagatgtacgctatttatatgattataatgagcaagaattaatagacttggcacaaaaggcacaaatattagcacaaaaagctaagaaagtttacgtcatatttaacaataattctggtggtcatgcagcaaataatgccaaaacatatcagcgattattgaatatagaatatgaagggttagcaccacaacaattaaaattattttaagaggcgacgactatgttattaacaattacattattagttttaatcggaggtttgtcagcgattataggttcaatcgtaggcattggaggcggtattattatcgttccaacaatggtttaccttggtgttgaacatggattactacataatattacaacacaagtagcgatagggacgtcttcagtcattctaattgtgacaggactttcttcatcacttggatatttaaaaacaaaacaagttgatattaaaaatggttccatctttttatttggactattaccaggttcattgcttgggtccttcattagtagatatttaacatttgagtcatttaatttatattttggtatctttttaattttcgtagccattttattaatggtaagaaataagattaaaccgtttaaaatttttgataaacccaagtatgaaaagacttatgtagatgctaaaggtaaaacatatcattatagtgtgccaccattgtttgcttttattacaacgtttttaattggtatattgacaggtttatttggtattggaggtggcgcactaatgacgccactaatgcttattgtatttagatttccacctcatgtagctgttggaacaagtatgatgatgattttcttttcaagtatcatgagttctatagggcacattgctcaaggtcacgtagcttgggggtatgcaatcattttaattatttctagttattttggtgcgaaaatcggtgtcaaagtgaatcaatcaattaagtcagatacggtagtaacattattgagaacagtaatgttgttaatgggtatatatttaattattcgtgcgttgatttaatacaactttaaaaggaggacgtcaatttgaggcttacaatttatcatacgaacgatattcatagtcatttacatgaatacgaacgcattaaagcatatatggcagaacatcggccacgacttaaccatccttctttatatgttgatctaggtgatcatgtagatttatccgcacctataactgaagcaactttaggtaaaaagaatgtggcattactaaatgaagcaaaatgtgatgttgcaacaatcggtaataatgaagggatgaccatttcacacgaagctttaaatcacctttacgacgaagcaaaatttatagtgacatgtagcaatgttatagatgaatcaggtcatttaccaaataatatcgtttcttcttatattaatgacatagacggtgtgaaaatactattcgttgcagcgacagcaccttttaccccattttatcgtgcactaaattggattgttaccgatccacttgaatctataaaagaagaaattgaacttcaacgaggtaaatttgatgtattaatcgtgctaagtcattgtggcattttcttcgatgaaacattatgccaagaattgcctgaaattgatgtcatttttggtagtcatacgcatcattattttgaacatggtgaaatcaataatggtgtactgatggcggcagctggaaagtatggtaattatcttggagaggttaatttaacttttgaggcacataaagtagtacataaaactgcaaagattattcctttagaaacattacctgaagttgaaacttcatttgaagaagaaggaaaaacgttaatgtccaattcagtaattcaacatccagtagtgcttaagcgtagtatgaatcacataactgaagctgcatacttattagctcaaagtgtttgtgagtatacacatgcacaatgtgccatcatcaatgctggcttactcgttaaagatattgtaaaagatgaagtgacagaatatgacattcatcaaatgttaccgcatccgattaatatggtaagggttagactttctggtgtgaaattaaaagagattatagccaaaagtaataaacaagaatatatgtatgaacatgcacaaggtttgggtttcagagggaatatatttggaggatatattctttataatttagggtacattcattctacagggcgttactatctgaatggagaagaaatcgaagacgacaaagaatatgtactaggtacgatagatatgtatacgttcggtcgttatttcccaacattgaaagaattaccaaaagagtatttaatgccagagtttttaagagatatatttaaagaaaaattattggaatattaaaaagtaagattattggattttcatttgtcatgaatttcgatataatgtttaaagatacacttaacaggagggtatgtgttgttatggcgacaaaaaacgaggaaatattacgtaaaccggattggttgaaaataaaattaaataccaacgaaaactatacaggacttaagaagatgatgagggaaaaaaatcttaatactgtatgtgaagaagctaaatgtcctaatatacatgaatgttggggtgcacgtcgtacagcgacatttatgattttaggtgccgtatgtacaagagcttgtcgtttttgtgcggttaagacaggtttacctaatgaacttgatttaaatgagcctgaacgtgtagctgaatcagttgaattaatgaacttgaaacacgttgttatcactgctgttgcgcgtgatgatttaagagatgctggttcaaatgtttatgctgagacagtacgtaaagttagagaaagaaatccatttacaacgattgaaattttaccatcagatatgggcggggactatgatgcgttagaaacattaatggcttcaagacctgacattttaaaccataatattgaaactgttcgtcgcttaacaccgagagttcgtgcgcgtgcgacttacgacagaacattagagtttttacgtcgttcaaaagaattacaaccggatatcccaactaaatcaagtattatggttggattaggtgaaactatagaagaaatttatgaaacgatggatgatttacgtgcgaatgatgtagatattttaacgattggtcaatatttacaaccttcacgtaaacatttaaaggttcaaaaatattacacgcctttagagtttggtaaattaagaaaagtggcaatggataaagggtttaaacattgccaagctggacctttagtacgtagttcttatcatgcggatgagcaagtaaatgaagctgctaaagaaaagcaacgccaaggtgaggcacagttaaatagttaatatttaacaattaataaggcataaaggcttagtttgtacaaaacgaacgtgtcttagaagtaatcattatttttatgaaacactaaaagtataaactgagcctttcattgtcatagataggtgaagaatttgataaaagtagatcaacattactttgaattaatagaaaattatcgcgaatgttttaatgaagaacaatttattgctaggtattcagatattttagataaatatgattacattgttggtgactatggttacgatcaattacgattaaaaggtttttacaaagattctaataaaaaagcagagatgagtaaacgtttttcaaatattcaagattacatatttgaatattgtaactttggttgtccttactttgtattaagacatttgtctaaacaagaggttaaaaagttaatcgaagaagttcatccgtctgatgtgatagatgacgacaataaacttcaagatgtgaagattaagccaaccattcaagatactgaacattaataaaacccttagctagattaaaaatgggaatcatgcaattcaagcatggacctgtaatctagttagggggttttatctttaatgaatgacttcatttaaatactcagtaatttcatcgccttcttcagcatttacacctaaaatatgagcgatatagccttcttcttttaaatcatcagtaccgataataccgaatttatttgtttgcatattaagtacgagtgtcttaccataatgtctatttgtatggactaacattaaatcatatcgactatgctcgccaacaaaaccaacaaactgaacttgactctcttcgttgtcatcatataaatacatatcaatcattttgtagcgactccttttaaaagtagtaaagttagtataacgacaaatgaagtatactgcaaaattatgataatatataagcgagaggtgacaaggaatgtattttgtagacaaagataaactaactcagaaattagcctatttacaagcattaactgatgattatcatgagagcaagcacaatcattatgcatttgaacgcattgctcaaatgttgatagaatcatcggtagatatagggaatatgattatcgatgcatttattttaagggatcctggtaattataaagatgtgattgatatattagaactagaaaatgttattactaaagaaacacagcaggcgattaataaaactgtcgatattcgtaaacaatttacatatgattacacagccttagatattaaggttatcatgccaatgtttgatgacgcattaccttattacaaacaatttattacagaagtaacgacatttttacatcaagaaaatgtaccagtaacagcttttggtaaaggagaaaatcaataatgaaacagtataaagcgtatttaatcgatttagatggcacaatgtatatgggaacagatgagattgatggagcaaaacaattcatcgattatttaaatgtaaaaggcattcctcatttatacgtaacaaataattcaacaaaaacacctgagcaagtaactgaaaaattacgtgaaatgcacattgatgcgaaaccagaagaggttgtaacgtcagcgttagccactgctgattatatttcagaacaatcaccaggagcatcagtatatatgttaggtgggagtggtttaaatactgcgttaaccgaagcgggacttgtcattaaaaatgacgagcatgttgattatgtagttattggacttgacgaacaagttacatatgaaaagcttgcgattgcaacgttaggtgtaagaaatggtgcaacatttatttctacaaatcctgatgtatcaattcctaaagagcgtggtttattacctggtaatggtgctattacaagtgttgtaagtgtatcgacaggtgtatcgccacaatttattggtaaaccagaaccgattattatggttaaagcattagaaattttaggattagataaatccgaagttgctatggtaggcgatttgtacgataccgatattatgtctggtattaacgtaggtatggatacgattcatgtacaaacaggtgtatctacgttagaagatgtgcaaaataaaaatgtgccaccaacgtattcttttaaagatttaaatgaagcaatagctgaattagaaaaatagatatagtcattttataaagtaggtgaattgatttggtaaaaatagttgtttcgaggaaaattccagataaattttatcaacaattaagtaaacttggtgacgttgttatgtggcaaaaatcattagtgcctatgcctaaagatcaatttgtgacagcacttcgtgacgcagatgcttgttttattacattaagtgaacagatcgatgcagaaattttagcacaatcaccaaatttaaaagtaattgcgaatatggctgtaggatatgacaacatcgatgttgaaagtgcaacagcgaataacgtggttgtcacgaatacaccaaatgtacttactgaaacaactgcagaattaggatttacattaatgcttgctatagcacgccgtattgtagaagctgaaaaatatgtagaagcagatgcatggcaaagctggggtccttatttattgtcaggtaaagatgtcttcaattcaactattggaatatatggtatgggagatattggtaaagcttttgcaagaaggttgcaagggtttaatactaatattctttatcataatcgatcaagacataaagatgcagaggcggactttaatgcaacatatgtttcttttgaaacgttgttagcagaaagtgattttatcatctgtacagcgccacttacaaaagaaacacatcataaatttaatgctgaagcatttgaacaaatgaaaaatgatgcaatttttattaatatcggtagagggcaaattgtagatgaaacagcattaatcgatgcactagacaataaagaaattttagcatgtggtttagatgtattagcaaatgaaccgattgatcatacacatccattaatgggacgtgataatgttctgattacaccacacattggtagcgcatcagtaacaacacgggacaatatgattcaattatgtattaataatatagaagcggttatgacaaatcaggtaccacatactccagtaaattgaaaataagtatggtttttaatcattggtaaaacaagcaaagcaattgttaaatatgttatgcttgacttgcgaatgtatatatttgcgctgatgataattcaataacattataaactcgtcatattaatgtgatgagtttatttgattttgacgtatataacaaaattgttatatagactgtaattgtttattgtttaaataacctttaaaatgaatgatgttctcaacaaagtgtatcatttacaataattgagtgatgacaaccaattactatgttgaatctataaaattaaaattgaatttcattatgaatatcgatataatgaattgtaaaaaacaaattttaaaacgtattttatattgaacggtctttataaaggcgtttttactaagaactttaagaggtgcaatatgaaatctaaaagtaaacagccacctaataaatatgttgaagcattcaaaccatatttattaacactattgtatttggcaatatttattactttatatttaatttatggcagtggcgacacacacaataacttcatttataatgagttctaatgagggagacttaatatgacagatattattaacaagctgcaagcgtttgcggatgcaaatccacaaagcattgctgttagacacacaactgatgaattaacttatcaacagttaatggatgagtctagtaaattagcacatcgattacaaggtagtaggaaaccgatgattttattcggtcacatgtcaccatatatgattgttgggatgattggtgccattaaagcaggatgtggatatgtacctgtagacacttcaattcctgaagaccgtattaaaatgattattaacaaggttcaaccagagtttgtatttaatacgactgatgaatcatttgaaagtttagaaggcgaagtatttacaatagaagatattaaaacatctcaagacccagtaatttttgatagtcagattaaagataacgacacagtatacacaatctttacatctggttctactggggaacctaaaggtgttcaaattgaatatgcaagtttagttcaatttactgagtggatgttagaacttaataaatcaggaaatgaacaacaatggcttaaccaagcgccattttcatttgatttatctgtaatggctatttatccatgtttagcatcaggcggtacattaaatcttgtagataaaaacatgattaataaacctaaattattaaatgaaatgctaacagcaacaccgattaacatttgggtatcaacaccatcatttatggaaatgtgtttattattaccaacgcttaatgaagaacaatatggtagtcttaacgaattcttcttctgtggtgaaattctacctcacagagcagcaaaagcgttagtaagccgtttcccaagtgcgacgatttacaacacatatggtccaactgaagctacggtagcagttacaagtattcaaattacacaagaaatcttagatcaatatccgacattacctgttggcgttgaaagaccaggcgcaagattatctactacagatgaaggtgaacttgttatcgaaggtcaaagtgtaagtttaggatacttaaaaaatgaccaaaaaacagctgaagtatttaatttcgatgacggtattcgtacttatcacactggtgataaagcgaagtttgaaaatggtcaatggttcattcaaggtcgtattgatttccaaatcaaattgaatggctacagaatggaattagaagaaattgaaacacaattacgccagtctgagttcgtaaaagaagcgattgttgtacctgtatataaaaatgataaagttattcatttaattggtgcaattgtgccaacgactgaagttacggacaatgcagaaatgactaaaaatattaaaaatgacttgaaatcacgcttaccagagtatatgattcctagaaagtttgaatggatggaacaattgccattgacttcaaatggtaaaattgacagaaagaaaattgcagaggtaattaacggatgattccatatggtgattttacattcttcttaattgctttaattgcattattaccagtcattatacttggatttttaggtaagcgaagttacatttataatggcgtagttacagcatttatgattgtgttaatcttttcttctgataaacataatctgtttgaccaaaagtatttaagtgttcaattaattagttttattatttacgtcgtatggcaagttttattgataatgttttattatcattcaaaaccaaaaaataattcattttcaaaatttgtaactgtaatggttttatcaatattgccattagcacttgtgaaagtgttacaaagtacatggttaggtggacatcagattcacttccatgaaagtaaattaattgaatttgttggtttcttaggaatttcttatgttacattcaaaagtgtgcagttaattatggaaattcgtgatggttctatcaaagaaattaaagtatggaaattaattcaatttatttcattcttcccaacgatttcatctggaccaatcgatcgttacaaacgtttcgttaaagacgataaaaaagtaccaacaggcaatgaatatcgtgaattagtattaaaagcaattcacatgattatgcttggtttcttgtataaatatattgttgcttactttattaacacatatgcaatcatgccgttacaattagacttacatggctttgtcaatttgtggttatatatgtacgcatacagcttatatttattctttgactttgcaggttatagtttatttgcgatagcatttagttatttattcggtattaaaacaccaccaaacttcgataaacctttcaaagcgaaaaatattaaagatttctggaatagatggcatatgacattatcattctggttcagagattgtatttacatgagatctttattctacatgtctcgtaaaaaattattgaagagtcaatttgcaatgtctaacgtggcattcttaatcaacttcttcataatgggaatttggcatggtatcgaagtgtattacattgtttatggtttataccatgcagcattgtttataggttatggctattatgaacgttggcgtaagaaacatccgccacgttggcaaaatgtaatcacaacagcacttagcattgtgattacattccactttgtaacatttggctttttaatcttctcaggtaaacttatataataaaggagaatttaattatggaatttagagaacaagtattaaatttattagcagaagtagcagaaaatgatattgtaaaagaaaatccagacgtagaaatttttgaagaaggtattattgattctttccaaacagttggattattattagagattcaaaataaacttgatatcgaagtatctattatggactttgatagagatgagtgggcaacaccaaataaaatcgttgaagcattagaagagttacgatgaaattaaaaccttttttacccattttaattagtggagcggtattcattgtctttctattattacctgctagttggtttacaggattagtaaatgaaaagactgtagaagataatagaacttcattgacagatcaagtactaaaaggcacactcattcaagataagttatacgaatcaaacaagtattatcctatatacggctctagtgaattaggtaaagatgacccatttaatcctgcaattgcattaaataagcataacgccaacaaaaaagcattcttattaggtgctggtggttctacagacttaattaacgcagttgaacttgcatcacagtatgataaattaaaaggtaagaaattaacatttattatttcaccacaatggtttacaaaccatggtttaacgaatcaaaactttgatgctcgtatgtctcaaactcaaattaatcaaatgttccagcagaaaaacatgtctactgaattaaaacgtcgttatgcacaacgtttattacagtttccacatgtacacaataaagaatacttgaaatcttatgctaaaaaccctaaagaaactaaagatagttatatttctggttttaaagagaatcaattgattaaaatagaagcgattaaatcattgtttgcaatggataaatctccattagaacatgttaaacctgctacaaaaccagatgcttcttgggatgagatgaaacaaaaagcagttgaaattggtaaagctgatactacatcgaataaatttggtattagagatcaatactggaaattaattcaagaaagtaagcgtaaagttagacgtgactacgaattcaatgttaattctccagaattccaagatttagaattacttgtaaaaacaatgcgtgctgctggtgcagatgttcaatatgtaagtattccatcaaacggtgtatggtatgaccacattggtatcgataaagaacgtcgtcaagcagtttataaaaaaatccattctactgttgtagataatggtggtaaaatttacgatatgactgataaagattatgaaaaatatgttatcagtgatgccgtacacatcggttggaaaggttgggtttatatggatgagcaaattgcgaaacatatgaaaggtgaaccacaacctgaagtagataaacctaaaaattaaaatacaaatagcacataactcaacgattttgattgagcgtatgtgctatttttatattttaaatttcatagaatagaatagtaatatgcgcttggatatgtggcaataataaaataattaatcagataaatagtataaaataactttcccatcagtccaatttgacagcgaaaaaagacaggtaataactgattataaataattcagtattcctgtctttgttgttattcataatatgttctgttaacttaatatctttatattagaatacttgttctacttctattacaccaggcacttcttcgtgtaatgcacgctcaataccagctttaagagtgattgtagaacttgggcatgtaccacatgcaccatgtaattgtaatttaacaataccgtcttccacgtcaatcaatgagcagtcgccaccatcacgtaataaaaatggacgaagacgttcaataacttctgctacttgatcaaacatcgttgtatcttcagtaggcatcaggcaagtctcctttcgagagatgaatttgataatctttattagtatattataatagatagtgtaataaaaatctatcaaaccaatgggggataaatatatggagcacgtgagtgtggtagtatatggggcagatgttatttgtgcaagttgcgttaatgcgccaacatcgaaagatatttatgactggctacagccgctattaaaaagaaaatacccaaatatatcatttaaatatacgtatatagatattacaaaagataatgacaacttaacagatcatgatttacaatttattgaaagaatagaacaagatgaactattttatccattaattacaatgaacgatgaatatgtagcagatggttatatacaaacaaagcaaatcactcgatttatagaccaaaagcttgtgaatgaataatatacacataacaaaaagcaatgtcagtaatagtgtgaactgacattgctttttaattttaaccattatgatatttatataaccaaagtacgccggattttaaaatagaagcgagtcgtcctgttacagtgcgatccatgatatatgcaaaaccttgtttatctcctaatgacccaacgataccttgtacctttagttccggcattttgtcaggtaatggttcatttagccattgctttttaagcacatcggcaatttgatcaccttgaacttcggctaactgagcacttggcgcatgtggtaaatcagcacaatcaccaactacatagacgttacgatatgttggtacttgatgatactggttaactatcacgcgtccattactatttatatcaatcggcaagttacgaacaacttcaacaggttgaattcctgctgtccatacaactaaatcaatatctttaggttcatcacagttatatattttaccaggttcaactttattaatatttgaatttggaacaacagtaacattatttttggcgaaccatttcgcaacatacttacttaatttttctggaaaatttcttaaaattcgcggcccacggtcataaagatatatttccaagtctgatctactttctcttaattcgctggcaagttctatgccgcttaatccagcaccaacgataccaactttagcaccttctggtagttcactaatactatggaaagtatcccgagcctttgagagtgtttgaatactatgtgtatattcttcggctcctggaacgttatgatatttatcttcacatcctaaaccaatgattagctcatcataatcaattttagaattaccgactgagacaatttgagcatctaaatctatgtcgttaatttcaccataaactgtattcacttgtggatgattagggaatttcatgcgaacatctttatctgatttcgtgcccgcagctaaagcataaaattctggtttcaatccatgaaatggcatacgatcaactaatgtgactgtataatcttgtggtaaagaagtagttaaaatgcgtgacatgatacgcatattaccatatccgccgcctaacaaaactaagtttttcataatgaagtaccccttttatatgttaatatttactttaattttgaaaagatcaaagtgcatagatatatttgttaatgaacagttataaaatgcaagtgtctttgattcatcaataacccctaaaaaagtaaatatgtatttatatgcttattatatatttttttgaaaatgactacaaataaatatttgtactaactaaggcactattacataactgggataagaaacatcagttgttgtaattgagcacatcatgttaaaataccagttttaaaatgctataatattgtaacaaatgaaataagaaggtgaagtatgaatccgatcgtagaattttgtctctctaacatggcaaaaggtggagattatgtttttaatcaactggaaaatgacccagatgtcgatgtgttagagtatggttgcctgacacattgtggtatatgttcagccgggttgtatgctttagtaaatggtgatattgttgaaggtgattcgccggaagaattattacaaaatatatatgcacatataaaagaaacttggattttttaaggaggagttatcatgccaacagttatattaacagaagcagctgcttacgaagtaaaagatatgcttaaagcaaatgaaatgccagatggctatttaaaaattaaagtgaatggtggcgggtgcactggtttaacatacggtatgggtgcagaagaagcgcctggtgaaaatgatgaaatcttagaatactttggattaaaagttttagtagacaaaaaagatgcacccgtattaaatggtacgactattgattttaagcaatcattaatgggtggcggtttccaaatcgacaatcctaatgcaattgcttcatgtggctgtggtagttcatttagaactgcaaaagttgcaggtaatcctgaaaattgctaataaaataactttaaatggttaacccaatttttgggatacaaattgatatcaattttgattagggacatatttgattatgtcctatttttgcgtaaagatattttgttttattaaaaagcttattgaaaattaagaatctgactataaatagtaatttaaatgatcgtgataacggatacatttttaatcgaaatcaggctacgaaaaaattaattaattttttcacaatctgactgaatcttgcttgaaaatataacataaaagctatagaattagtattggattaaaaatgtcttttttgtgaacatcacaggtttttacataatttaaaagacttaaataacaaaatgatgataaactagtatacattgtggtaaaagtagtaatgaccagttgttactagtaattatcagcatttggttaaaaaaatatgaaagcttaggtgaaattaaatggctcaagatcgtaaaaaagtacttgtacttggtgctggttatgcaggtttacagactgtaactaaattgcaaaaagcgatatcaacagaagaagcagaaattacgcttattaataaaaatgaatatcactatgaagcaacatggttacatgaagcatcagcaggtacactaaactatgaagatgtattatatcctgtggaaagtgtcttgaagaaagacaaagtgaactttgttcaagcagaagtaacaaaaattgaccgtgatgctaaaaaggtagaaacaaatcaaggtatttatgactttgatattttagtagtagcattaggtttcgttagtgaaacattcggcatcgaaggtatgaaagatcatgctttccaaattgaaaatgttatcacagcacgtgaattatcacgtcatatcgaagacaaatttgctaactatgcagcatcaaaagaaaaagatgataacgatttatctatcttagttggtggtgctggattcactggtgttgaattcttaggtgaattaacagacagaattcctgaattatgtagcaaatatggtgtggatcaaaataaagttaaaatcacttgtgttgaagcagcacctaaaatgttaccaatgttctcagaagaattagttaaccacgcagttagctacttagaagaccgcggtgttgaatttaaaattgctacaccaatcgttgcttgtaacgaaaaaggttttgtagttgaagtagatggtgaaaaacaacaattaaatgcaggtacttcagtatgggcagctggtgtacgtggtagtaaattaatggaagaatcatttgaaggcgttaaacgtggacgtatcgttacaaagcaagatttaacaatcaatggttacgacaacatttttgttattggtgactgttcagcgtttatcccagctggagaagaacgtccattaccaactacagcacaaattgcaatgcaacaaggtgaaagtgttgctaaaaacattaaacgcatcttaaacggtgaatcaactgaagaattcgaatacgttgatcgtggaactgtttgttctttaggttcacatgacggtgtaggtatggtatttggtaaacctatcgctggtaaaaaagcagcattcatgaaaaaagtgattgatacacgtgcggtattcaaaatcggtggtatcggtttagcattcaaaaaaggtaaattctaggctttaaataaagtttcagctaaacacataaaattaaattattcatttataaagtccttcagtgtcactgaagggctttattgttgtacaatttgaagtgagtaacatatcaaatctaaggaggtacattatgaattttaaattaaataacacactaagcaacgaaataaatacattgattattggtataccagaacatttaaatcagttagagcgcattagttttaatcatatcgatattacagaatcacttgaaagactaaaacatcaacatattattggtagtaaagttgggaagatttatacaactgcatttgatgtacaagatcaaacatatcgtttaattacagttggtttaggaaacttaaaagcacgtagttatcaagatatgttgaaaatatggggacatcttttccaatacataaagtcagaacatattgaagatacgtatttacttatggattcatttatttcaaaatatgatcagttatcagatgtattaatggcatgcggtattcaaagtgagcgtgcaacatatgaattcgatcattataaatcaagtaagaaggcaccgtttaagacgaatttaaaccttattagtgaatcattaattgaattagatttcattcatgagggtatcagtattggccaatccattaatttggcaagagactttagtaatatgccaccgaatgtattaacaccacaaacatttgcagaagatattgttaatcattttaaaaatacaaaggtcaaagtagatgttaaagattatgacactttagtttctgaaggattcggacttttacaagcagtaggtaaaggtagtaagcataaaccgagattagtaaccatcacatataatggcaaagacaaagatgtagcaccaattgccttagttggtaaaggtataacgtatgattctggtggttatagtattaaaacgaagaatggcatggctacaatgaagtttgacatgtgtggcgctgcgaatgtcgttggtatcattgaagcggctagtcgtttacaactgcctgtaaatattgtcggagtgcttgcttgtgctgaaaatatgataaatgaagcatcaatgaagccagatgatgtatttacagcattaagtggtgaaactgtagaagtaatgaatacagacgctgaaggtagattagtccttgcagatgctgtgtattatgcaaatcaatatcagcctagtgtgattatggactttgctacattaacgggtgcagccatcgttgcactaggcgatgataaagctgctgcatttgaatcgaatagtaaagtgatattaaacgatatattacaaataagttctaaagtcgatgaaatggtatttgaattaccgattactgcaaccgaacgtgcaagtattaatcacagtgatatcgctgatttagttaaccatacgaatggacaaggtaaagcgctatttgcggcaagttttgtaacacattttagtggtcaaacacctcacattcatttcgatattgcaggtccagcaacgactaataaagcttcatataatggtccaaaagggccaacaggatttatgattccgacgatagtacaatggttaaaacaacaataatttaattatttgcctgatacaacttgtgtcttgttatacatttctaatttaactcttgaaagtataaaggatcgcattgtatcaggcattttcattgttgtaagaaaatataaatcgcatatccttgtgagcataaatcaacttgattagcattgcaaaaacttattataatcatatgctcattcagtcaacgactactaatataacattatagaacttaggattttgattggtgttccaggcttgtaaaattgtttaatttaatgaaagtgaaaattattttaagaaagacaattaactaaaaaataaagattatgggtatagtttgctattgacaggtgttaaagctactgatactatgtagtctataaacgctttagttcgatagagcgataaaggatggttatcatatgataaatgcagtagtaatagcagtaatattaatgattgtgctatgtttatgtcgattaaacgtagttataagcttatttatcagtgcgctagttggtggcttaatttcaggcatgagcattgaaaaagttataaatgtatttgggaaaaatatagtcgatggtgctgaggtagcattaagctatgcattattaggtggatttgcagcattaatttcatacagtggtatcacagactatttagtaggaaaaattataaatgcaattcacgctgaaaatagtcgatggtcaagagttaaagtaaaagtgacaataatcattgcattattagctatgagtatcatgagtcaaaacttaattcctgtacatattgcattcattccaattgtcatcccaccattgttaagtctgtttaatgacttaaaaatagatagacgtttaatcggtttgattatcggttttggtttatgtttcccgtatgtgttattaccatatggattcggtcaaattttccagcaaattattcaaagtggctttgcaaaggcgaatcatccaattgagtttaatatgatttggaaagcaatgcttattccttcaatggggtatattgttggcttacttatcggtttatatgtatatcgtaaaccacgtgaatatgaaacacgtaaaatttcagatagtgacaatgttacagagttaaaaccatatatcttaatagtaacaattgtggcaatactagctacatttttagtacaaacatttacagattcaatgatttttggtgcactggcaggggtactcgtattctttatttcacgtgcatataattggtatgaattagatgctaagtttgttgaaggtattaaaattatggcttatattggtgtagttattttaacagcaaatgggtttgctggtgtaatgaatgctactggtgatatagatgaattagttaaaactttaacaagtattactggtgataataaattatttagcattatcatgatgtatgtgataggtttaattgtcactttaggtattggatcatcatttgcaacaattcctattatcgcatcattattcattccttttggagcgtcaattggactagatacaatggcattaatcgcattgattggaacagcgagtgcattaggtgactcaggttcacctgcaagtgattcaacattaggaccaactgcgggattaaatgttgatggccaacatgatcatatacgcgatacatgtgtaccaaacttcttgttttataatattcctttaatgattttcggtactattgctgctatggtactataagcataaagaggtgaaaatatgactcatttattagagacatttgagatgtcaatagatcaccaggaagatggtttagttgttatttctatgcctgtcactgataaagtaaaacaaccatttggatatttacatggtggggcttcgattgctttaggtgaaacagcatgttcattaggatctgctaatttaattgatacaaccaaatttattccattaggtttagagatgaatgctaaccatattcattctgctaaagatggtcgtgttactgcgacagctgaaattattcatcgaggtaagtcgacacatgtatgggatataaaaattaagaatgacaaagaacaattaattacagttatgcgtggtacagttgctattaaacctttaaaataaaagaactgctagctgaaatgttatgagatattcataactacggctagcagtttttttatgcgctatattgttgtagttttagaaatgcttgttcaatgcgttcggcagctttacggccacccataacatttctaccaaatggtcctaattctaagtctgcaaagcatcctgcgacaaatagatttggtatccattctaatttttcggaaataacagggtaattacattcgttgataggtgcatcataattttgtattaattgcttaataagtggttgtgacataaaatcttgttcaaaaccagttgcaaccataatctgttgatatggaacagaattattttcagtgttaattaaaccatcactaatttgagtgataggtgttttatgcacatttatacgaccatttttaatatgttttttaaggcgtaagtacagttcgtgaggcattgatcctttatgacgttcacgttgtacaatggcatttctttcaggcatgcttttagtacttaaaaatgaagacatatttttcggacctaaccaaccaggatcagcatcaaagtcatgtatttcaatatctttatttagccataaatgaatctttttatcgttatcatgatttaacaatttaagtgcaagatgtgcagcagtaatgccactaccaacgatatgatcggtcttatcatatactacttgatcatgttctttctcgaaaatatgatttacattctgtttgtcttttaaaatgtcaggcataaacggaatatttgtactgcctattgcaataacgacgcaatctgtagtgataatttgtccatcttctaacttgatatgccatttgtcttcttgtttatctaaagtttgaactaaaccttgaaccaagcaatcctctaattgatattgtttagaagcatgtgcaatatgatccataaacattgtcaattcaggtcgttgataaggaccataaaaagcatttgtatattggtgctgtttagcgaattgttttagatggaacggttgtggatgtacgtgatgtacaatcggtgatcttaaataagtcatttctattcgatttgtatatgagttaaacctttggcaaaaagtttcgtatgggtcaatgattgttaatcggtctgttgttaatccgcttgataatagtttttgtgcgattgcagttccctgtatgccaccgccgataattgtccaatgcataataaaacctctcttttttaaagcgtaatcgttacgatttataattattattatcataatacataacgacatgaaaggcaattaaattaaagagatatacgtagatagggcgaagctgtagtcaaagaaaaaatcattgaaaaagaggtaacaatgtcaaaagaaaacagcagtaaaatcattcctaatttggaatcatcttactgctgtttgttgttgatttatattcatgattttgttatataatctacaattttgtgtcttttaagtcttccgaaatttcatcgactttagtctttttagtataaggcgttttaatattatatgctgctttcataatcatatgacttgaaagaggacctgtaattaatacaaagataatcgcaacgattaattgcatatttacaaaaccttgagtagcaataaaatataaaaacgtaccaaatagtaatgacattgcacctaatgttgatgcttttccggcagcatgtgcacgtgaatatacatcttcaagtctcaataatcctatagctgctagggcgctaattaaagcaccgatgataacaaagataagtgcaagactaatcagtatgattttgatcatgttcaatcaccttacctttgtccataaatttagagaatactgcagtacctaaaaaagctaatataccaatcatcataataacgacaatcatgtatttaatatttaataaaatactgaataatgctataactgccattaattgaagaccaatcgcatctaatgcgacaacacgatcggcaagtgatgggcctagcacaacgcgaatgagcatagctaacatagaaatgacaactatgattaatgcaataacgataataacattatgattcattatatttcgcccacctctcttacaattttctctaatgatgttttaatactttctacttcttgctctttagttgaaaaatctatggcatgaatataaatttttgtacgatcgtcacttacaccaagcactacagtaccaggtgttaatgtaattaaattagacagcaagacaatttgccaatctttttttaaatctgtgtgataaacaaagaatcctggttcatttttaatcgaaggtttaataataattttcaaaacatcaaaattagctttaatcagttcgattaagaaaataataactaatttaataatacgatatagcgtgatgacataaaatctacctggtaacactctgtgtaagaggtaaacaagaactaggccaaagatgaaacctaacacaaagttatttgttgtgtaactatttgttacaaacaaccaaaacactgcgataataaagtttaatactaattgtacagccatgttatttacctcctaatacagctttaacgtaggttgatggattgtagaatgtttctgcaccagcttttaccattggatataagtaatctgctgacaatccatataaaacagttatcacaactgcaacgattgcaatcgtagttaaatatttgacgtcgactttgttattaagatcatatccttttggttgaccgaaaaagccttgtaggaatatgcgaatgacagaatataatacgactaaacttgataataagacgatgacaccacttaaataaaatcctctttcaaatgttgattggacaatgaaaaattttccataaaagccactgagtgggggaatgccagctaaacttaatgctgcgataaagaatgaccaaccaagtacaggatatcgtttaattaagccaccaaattgtcttaaatcagcagtgcctgtaattttaatcataattccgataagcaagaataatgcaagttttactaacatgtcgtgcaatgtatagtaaatagccccaatcatacctgactctgtcatcattgcaacgccgactaagatcacacctacagcaatcatgacattgtataggatgatttttttaatgttggcatatgcaacagcaccgacacaaccaaagatgatcgttaatagtgctaagaataaaatgacataatgtgaaaagcttacattatcactaaagaataggctcaatgttctagcgattgcataaacaccaacttttgttaacaaagcaccaaagaatgcaatgattggaattggtggtgcatagtatgcactaggtaaccaaacaaacattgggaatacgccagcttttgtagcaaaaacaaagataaatagtatgaaaacgatattgactaagccactgtcatgcgctgaaaggttagctaatttattgcttatatctgctagattcaatgttcctactactgaatataaaatcgctacacccattacgaagaaggatgacgatacaacgttaacaagaacatatttgattgtttcttgtagttgaatttttgtagaaccaattactaataagaaataagatgacattaaaaatacttcgaaaaatacgaataggttgaaaatgtcaccagttgtgaatgcaccaatgatacctattaacataaatagtactgaaaaataataataatatctttcacgttcaataccaattgtttggtatgaatataaaatcacaatagctgtaataataatactagtaattattagtagggcactgaatatgtctaatacaaagacaatactgtatggtgctttccatgaacctagctctacgcgtattggtccatgtttaacaacatttgctaaattgataattgccgcgaccaaggttaataatgtaccgcctagtgcgacataacgctttataataggacgctttccaataaagacaagtaatatggctgtaattactggaataactagcgttaacacaagcatattactttcaatcatcttctggaactcctttcatacactcaacgttatctgtgcctaattctttatatgttctaaatgctaatactaagaaaaaggctgttgtcgcaaaggcgataacgattgctgttaaaataagtgcttgcgggataggatcaacatagctttttacgttcgcttcataaattggaacagtaccatgtttaagtccgcccatagttattaaaaataagtttgctgcatgtgttaatagtgtagttcccataacaattcgtatcagacttttagacaaaacgagatagacacttattgctgtgagaataccactaacaaaaatcataataatttccactattcgttctctccaatcgaaataataattgtcatgacagtaccaactactgcacataaaacaccgaaatcaaagaatactgctgttgtcatatgaacaggttctaatataaataacggtatatcaaatgtgacatgcgtaaagaaatttttgcctaaaaaccaacttgcgataggcgtcgcaatacaaaaaactaatccgatacctatcaagattttaaaatctaatgggaaaattttacgcattgtttctatatcaaatgcaatcgtaatgataacaagtgaacttgcgaataataatccgccgacgaaaccgccaccaggtgtataatgtcctgctaagaaaagtgaaaaaccaaagaccattaccatgaaaaagataataactgcagcaaattgcaaaattagatcattttgttgtctattcatgatttttcacctcgttaccttgcgtttgacgctttttacgtaatttaatcattgtatatacagctaatcctgcgataccaagcacagatgactcgaataaagtatccataccacggaaatcaacaagtatgacgtttaccatgtttttaccgtgagctaaatcataaacgtgctcttgataaaacttagatatcgattcaaaatgtctatttccgtatgcaattaaaccgataataatgacggacaaaccaacaccaccagcaattaaagcattagtaagctggaatgagcgcttttcattataacgatttaaatttggtaagtggtagaagcataataagaacaatgctgttgaaatagattcaacgacaaactgtgtcaatgctaagtcgggtgctttaaagaatataaacaatacagacacagcatatccaactgcacttaacataatgatgctaaataatcttgatttagcgaaaagaattaaaaaggcagcacttaataataaaattacgatacaaacttcgaaaattctaatcggactaacgtctttaaaattaatgttgaaaggtactgagaatatagtgacaaatgttaataaaattaatgcaccaaaaatgataactaaattattacgtgaataatcggtaacatagctattcgtcatcttttcagagtagtttggaataacatttgcacttctgttgtaccaataattgaatgttagtttaccaggttgtcgttgcaacaatttcacccaataactaaatgtcacaattagtaagatacctaaaatataaatcactaatgttgataaaaaggcaggcgttaatccatggaacatatggaattcaacatcatcaattaccgtatgattaatcgaagatgtagctggttcaataatcgaattagttaaaatgccagggaataaaccaaatacaattactaatgtagctaaaatagctggtgataaaagcattaatattgatacttcgtgtgcttttttaggtaattgttcaggtttatattgtccgaaaaatatatgcattataaatttaattgaatatacaaatgtgaagacactgcccactataccaatgattgggaataggtagcctaatgtatcaacactgaataaatttgcttggcttgctgtaaatgttgtttctaaaaatgattcttttgataagaaaccattgaacggtggtacaccagccatacttaatgctgtaataacagtgattgtaaatgaaataggcataattgttagtaagccacctaatttcttaacatcacgtgtaccagtagaatgatccactgcacctgtaatcataaatagggcacctttaaatgttgcatggttgattaaatggaatattgcagccgtaaatgcagcagcatatattttgctatcatcgccttgatagtgataactaatggcaccgattccaagcatcgccataatcatacctaattgggatactgttgaaaatgccagtatacctttcaagtcttgttgttttgttgcgtttagcgaagcccagaataatgtaattaaaccaacgagtgtgacagtccatacccaaccttgcgatgctgcgaagattggtgtcattcgagcgattaaatataaccctgctttaaccattgttgctgaatgaagataagcactgactggtgtaggtgcttccattgcatctggtagccaaatataaaatggaaactgagcagattttgtaaaagcaccaatcatgattaaaatcatcgcaaaaatgaagaatgggctattttgaatttcagaagcatgttgaatcatgtactgaatgctaaatgattgtgttggtatagcgagtaagatgataccacctaataatgatagaccaccaaatactgtgattatgagcgatttttgagcaccatatatagatgcttgtcgttcgcgccagaatgaaataagtaaaaaactagaaaatgacgttagctcccagaataaatatagaataataacattatctgaaagtacgacacctaacattgcacccataaatagtaataaataacaataaaaattccctagttgttctgacttacttaagtagccgattgaatataatactactaaactgccgattcctgaaataagcaaactaaagagtaaacctaagccatcaagatataaatcaaagttcataccaaaatgaggcatccaatttaaggttttcattacagtattacctgacatcgtcgttttaattaatgtaagcatataaataaatatgacgatagggacaggtaatacgaaccatcctaaatgtatacgtttaaaaaatctatacaggataggaataatgagtgcgaatattaacggtaatatcaccgcaatatgtaacaaactcactatgttgtcctcctttaaaaaatatttatgttattcattatacatgaatgatatagttctgaaaaacgtacacactccttgttgtgctttattttcagaagtatttaaataagaagaaacacgtcattttttatttaaaattttctttgtattgaagtgaataatcttcttttaagcgtgctaaactagctaaagacatttcagcatgttttgtttgctgagctttaagtttagtttctaaatctgtaattgcttgttgaagtgaatcttcatagcgcaatacatcaacattgaagtcgcgtaattgtgaacgtttcgtatagcgtttttcaaaatggcttaatgctttgcggtcatggaaaaatacaccttcagtttcagtagggttatgtaaatcaccttgtttcgggtgtttgataacttgttcaactttaacaaggacatcgtctccattttcttcaacaatcgtgacaccatagctacctgttttgtgtgaaaatcgatatagcttcatgctattttcctcccttaaaagtatgttaatatatatgtatcataacatgaatggagaatataaatggctaactatccacagttaaacaaagaagtacaacaaggtgaaattaaagtggttatgcacacaaataaaggtgacatgacattcaaattatttccaaatattgcaccaaaaacagttgaaaattttgtgacacatgcaaaaaatggttattatgatggaataacattccaccgtgtcattaatgacttcatgattcaaggtggcgatccaacagctactggtatgggtggcgaaagtatttatggcggtgcttttgaagatgaattttcattaaatgcatttaacttatatggcgcattatcaatggctaactcaggacctaatactaatggttcacaatttttcattgttcaaatgaaagaagtacctcaaaatatgttaagtcaacttgcagatggtggttggccacaaccaatcgttgatgcatatggcgagaagggtggtacaccatggttagatcaaaaacatacagtattcggtcaaatcattgatggtgaaactacattagaagatattgcaaatacaaaagtgggaccacaagataaaccacttcatgatgttgtaattgaatctattgatgttgaagaataatatctaaacataattaactaccaacattttaaactcggataaagctaatttatgaatggattagtatatattccaacgaaaataaataaactaatatgatgagcaatctcaatatatttatcaagaaagcacagtttttaaatagatgtgtattttaaagataatagttgaggttgctttttatgtttttacagagaattgctattcaaatagtaaataaattgaaaacaaagtagctggatatcatattgatttagataggaatttgttgctaattttatttgtaaatccaagtttgtagaattcttattcatttataaaataatattcgtatgatttgatgttttaattagtccaccatttcgatttgtgctatgataatagtgttaagtaaacgaaataaggggttattaagttgaataactacaaaattggccaacatatcaaggtgcgtgtaactggtattcaaccatacggtgcgtttgttgagacccctaatcatactgaaggactgattcatatatcagaaattatggatgactacgttcataatttgaagaaatttctatcagaaggccaaattgttaaagctaaaattttgtctatagatgatgaaggaaagcttaatctatcattaaaggataatgattacttcaaaaattatgagcgtaagaaggaaaaacaatcagtattagatgaaatcagagaaacagaaaaatatgggtttcaaacacttaaagaacgcttaccaatctggataaaacagtcaaagcgagcaattcgaaacgactaaaggaacagataaatcgtaccgaaaatcatacaaagggtctgaaatgaaagtttcttagactataaaagagattagtatctattaaattttattagatactaatctctttttgtctacgataacgtaatatgattgattctatttacacgtacaaatggtttaaggtgacatatccattatctttgttagatagaatcgttgatttgcaatattgtatgtggatttgttttttttatttattttagaaatgagaactacaacttaaagtattaaacgaattgcaactatataaacagataattggagaatgaaaaaattacatgttatagtcaactcaataattttaaggaggaattaagtaatgaaaagtaaatacgaaccattgtttgataaagtagaattaccaaatggagtagagttgagaaatcgatttgtgttagcccctttaacacatatttcttcaaatgatgatggtactatttcagatgtagaacttccttatattgaaaagcgttcacaagatgttggtattacaattaatgctgcgagtaatgtgagtgatgtcggaaaagcatttccaggacagccgtcaatcgcgcatgacagtgatattgaaggactaaaacgattagctacagcaatgaagaaaaacggtgccaaagcactcgtacaaatacatcatggtggtgcacaagcattgcctgaattaacacctgatggagacgttgtagcaccaagtccaatttctttaaaaagtttcggtcagaaacaagaacatagtgctagagaaatgacgaatgaagagattgaacaagcaatcaaggattttggtgaagcaacacgacgtgcaattgaagcaggttttgatggtgttgaaatacatggcgcgaatcattacttaattcatcaatttgtatcaccatactataatagaagaaatgatgtatgggcaaatcaatataaattcccggtcgctgtgattgaagaagtgcttaaagcgaaagaagcgtatggcaataaagactttatagttggatacagattatctccagaggaagcggagtctccaggaatcacaatggaaattacagaggaactcgttaataaaattagccatatgccaatcgactatattcatgtttcaatgatggatacgcatgcaacgacacgtgaaggtaaatacgctggacaagaaagactacctttaattcacaaatggataaatggtcgtatgccacttatcggtattggttcaattttcacagctgacgaagctttagatgcagttgaaaatgttggtgttgacttagtagccattggtagagagctactactggattatcaatttgttgaaaaaattaaagatggacgggaagatgaaattattaattactttgatccagagagagaagataatcatcacttaactcctaatttatggcatcaatttaatgaaggattctatccattaccacgtaaagataaataagtgtttaactgttaccactaatgatattgtgtatgcaatttgttagtggttttcaatatttataaataaaaatattcttagtaaaatatacttttgattaagtgtaaaattatcaattcttttgcttgtaatcatttaagtaattatgtcattataaatgtaagggttttcaaaatagacaaatttaatgaaacttagtgattatttcatcttttttggtggaaaagtatctgctttgaaaactaatgtaattatttggataatgtttcatgtataatagttataaatgatgaaaaggggagatatgatgactaaatctgaaaaaattattgagttaacaaatcattacggagcacataattatttaccattgccaattgtcatttcagaagctgaaggggtatgggttaaagatcctgaaggcaataaatatatggatatgttatctgcatattccgctgttaaccaaggtcatagacatccgaaaattattcaagcattaaaagatcaagctgataaagtgactctagtttcacgtgcttttcatagtgataacttaggtgaatggtacgaaaaaatttgtaaactggcaggtaaagataaagctttaccaatgaatacaggtgctgaagcagtagaaacagctttgaaagcagcacgacgctgggcatacgatgttaaaggaattgagccaaataaagcagaaatcattgcatttaatggtaacttccatggtcgaacaatggcgccagtttcattatcttcagaagcagaataccaacgtggttatggtccgttattagatggatttagaaaagttgattttggagatgtagatgcattgaaagctgcaattaatgaaaatactgcagcagttttagtagaaccaattcaaggtgaagcgggtataaatataccgccagaaggatatttgaaagcaattagagaattatgtgatgaacataatgtcttatttattgctgacgaaatccaagcaggattaggtcgttcgggtaaattatttgctacggattgggataatgtaaaacctgatgtctatattttaggtaaagcactaggtggtggtgtcttcccaatttctgttgtattagcagataaagaagtattagatgtctttacacctggctcacatggttcaacatttggtggtaatccacttgcttgtgctgcatcaattgctgcattagatgttatcgttgatgaggatttaccagggcgctctttagaattaggagattattttaaagaacaattaaagcaaattgatcatccatcaattaaagaagtccgtggacgtggtttgtttataggtgtggaacttaatgaaagtgctagaccatattgtgaagctttgaaagaagaaggcttattatgtaaagaaacgcatgatactgtcattcgttttgcaccaccattaattattactaaagaagaattggaccttgcacttgaaaaaataagacatgtatttcaataatgtcaaaaagttgtaacaatcagtttgtaagggctttaaaaaggaatacgttatgttacaatatgtttgaaagcgaaatcattaggtaaagaagaggcgaaaaggatcatgactgagaacaataatttagtaacttctactcaaggaattattaaagaagcattgcataaattgggatttgacgaaggaatgtacgatttaattaaagaacctttaagaatgttacaagtgcgtatccctgtacgaatggatgatggcacagttaaaacattcacaggttaccgtgcgcaacataatgatgctgttggaccaacaaaagggggcgtgcgtttccacccagatgttgatgaagaagaagtaaaagcattatcaatgtggatgactttgaaatgtggcattgtaaacttaccatacggtggtggtaagggtggtatcgtttgtgatccacgtcaaatgagcattcatgaagttgaacgtttatcacgcggatatgtaagagcaatttcacaattcgtaggtccgaacaaagatattccagcaccagatgtatttacaaactcacaaattatggcttggatgatggatgaatatagtgcattagataaatttaattcaccaggtttcatcacaggtaaaccaattgtattgggtggttctcatggacgcgacagatcaactgcactaggtgtagttattgcaattgaacaagctgcaaaacgtcgtaatatgcaaattgaaggtgccaaggttgttattcaaggtttcggtaatgccggaagtttcttagctaaattcttatatgatttaggtgcaaaaattgtaggtatctctgatgcttacggtgcattacacgatccaaatggcttagatatagattatttattagaccgtcgtgatagttttggtacggtaacaaatttatttgaagaaacaatctcaaataaagaattgtttgaattagattgtgacattttagtaccagcggctatttcaaaccaaattacagaagacaatgcacatgatattaaagctagtatcgttgttgaagctgctaatggacctacaacaccagaagcaacacgtattttaactgaacgtggtatattattagttccagacgtattagcaagtgctggtggtgtaacggtttcttacttcgaatgggtacaaaataatcaaggttattattggtctgaagaagaagtaaatgaaaaactacgtgaaaaattagaagcggcatttgacacgatttacgaattgtctcaaaatcgaaaaatagatatgagacttgcagcatatatcataggtattaaacgtacagcagaagcagctagatatcgtggttgggcataattaattatcatatgtgatttaacgagcttgggacagaaaacaaagccctaagctcgttaattttattttagcagtagttgactgtaaaacaatgcccgtgtaacacgctcttttcaaaaatagtcggggccccaacacagaggctggtggaaagtcagcttacaatagtgtgcaagttggcggggccccaacacagaggctggcggaaagtcagcttacaatagtgtgcaagttggggtggagccccgacacagagaaattagctcctcaatttctacagacaatgcaagttggcgaggccccaacactgagaatttctaattaaacgctcaactatatatagttgatcaaaaagacagcagtaggataatttcaatttggaaatatcttactgctgttttttatagtaatagctatatttttgtatttatgttttctagtttaacaatactacttaattacttctttatatttatcagcgaaatttgtaaagacaccatcaacgccatatttatttaatcgtaacatatcagcttgttcattcactgtataaggatgtactataaatcctaagtcttttaaatgatgggtattttgttcagttaaatctgtataatctggacctaatccaatcgcataagagcgtatctcttttaagcgttggtcgttaaattgttgtagttcacctttatcaactaattttactaatggcacattcttattttgacgatgaattttctttaaactttcgtcagaaaatgattgaatcattacatgtccatttttaaatttattgttatttaaaaggtgatgctttttcaatgaagctaataattgttcttccattcctgggtatacatcaggtgactttgtttcaatataatagtttgcattcggaccataacgttctaaaatttcatctaaagtgggtactttagcatttttataacttgctcttgcgtattttggatattttttattaaaccaacttcctgcatctaactgttttaattcatcaagggtataatcctcaactttaccgtgtccatttgttgtacggttaacagtttcatcatgcatagcaactaaatggccatctttggtacgttgtaaatcaatttcgatatacgatgcttttaactcattatgactcttatcatatgcttgaaacgtatgctcgggtgcatagccacttgcgccacgatgagcgatagtagtgaatcgctcattcgttaaatttgtatgccattgaatagcctgaggtttatttgcaatttgatttgtttgttcagcgccagcagtaggtactgataaaaatcccatagtaaaaacagcagaagcagccataaatttagtgaagcttttcgaagagttagtcatagtctttatcctttcatctctttatttgtagtctaacaattttaaaatactacaaaaacctgcttgtgaaaacgctttacacatttcttttacaatttataacatttctgtaatataaatttaaaagaattatcaaacattttaggaatcttaaaaatgtgatgttcaataagacgaagagagcattaaaatacccacaatgtaattttcatagacattgtgggtaggtagattaacgtatttattgtgatagtaattgtttagcaacatcaagttgttgtttgaccgatgattgacctgttgaaccgtaactttgacgtcgttttaaacaattttcaggctgcaaataatcgtaaatatcggcatcaatactagaatgatgttgttgatatgttgctaaaggaacatctaataaataatgaccttgttgtatacattctaagacgatttttcctacaatttcatgtgcagttctaaatggaatatttttagttactaaataatctgctagttccgttgcatttgaaaaatcttctttaacagtttgattgagtcgttctttattaactgtcatcgtttgaatcataccttcgaaaatacgtaaagaacctttaattgtatggacagcatcgaataaaccttctttatcttcctgcatatctttgttatatgctagaggtaatccttttaaagtcataagcatgctcattaaatgaccagtcgttcgaccaactttacctctaattaattctgccatatcaggatttttcttttgtggcataatagatgagccagttgaaaatgcatctgataatgtaatgaatttagcttcgtctgtggaccagaaaataatttcctctgcaaagcgtgataagtgaaccatcgttaaagaaatattatgcaatgtttcaataatatagtctctgtcactaacagcatctaggctattctcatagagactgccaaagttcaacaatgctgttgtctcgtgtctatcgatagggtatgtggtaccacttaaggctgctgcacctaaaggattaatatcgattcgttttaaactatcttcaaatcgttgttggtctcgttgtaacatccaaaaataagtcataatatgatgtgcaaatgaaattggctgtgcacgctgtaaatgagtataaccaggcataattgtatcaacattattggaagcgatgtctacaattacactttgtaacgacttaattaatgcgatgatatcttgcacttgtttcttagtgtacaagtgcatgtctgttgcaacttgatcgtttctactgcgtccagtatgcaacttaccaccagcatcaccaatacgtttaattaattcatgttcaatatttaaatgaatatcttctaatgatgcactaaattgaatttgatcttgatgataatcatgttgaatagattttagtccttgtataatttgttcgctgtcttgttgactaataatgccttgattcgcaagcatagttgcatgtgcaatgctgccttcgatatcttgatctatgagcgtttgatcaaaagtaatggatgcgttaaagtcgtcaacccactcttcaggttgtacttcaaatctaccgccccaagctttattgctcattgctatagcctccatgcaacatcgcatttacttgagtaggtaaaccatagatatcgataaagccaacagcagcgtcttgattaaatgcatcttcttttgtataagttgctaatttttcatcatataatgtgtaaggtgattttctaccatttacgatggcattacctttgaataatttaattctgacatcaccacttacgtattgctgagtactatcaataaataattttaagctatcagttaaaggtgagaaccaaagtccattgtatagttgttcagcaaattgcttctcgatgattggtttaaagtgtgcgacatctttcgttaacgtaatcgtttctaatgctttatgcgcttttaaaataacttctgcagcaggtgcctcataaatttctcttgatttgatacctacaagtctattttctacatggtcaattcttccgataccatgcttaccagctaatgcattcaacgttaaaattaaatcgtctaattcatatgttttgccatcaatttgaactgggatgcctttatcaaacgttaaaatgatttcatcagcatcatctggtgtttcttctaaagcatttgttagatcgaacgcatcctctggtggcgcagcataaggatcttctaaaataccacattcattcgctctgccccatagattttgatcgatagaataaggtgaatcatggttgattgatacagggatattatgtttaattgcataatcgatttcttcttcacgactccatgcccactcacgtacaggtgcgaatgctttcaatgatgggtttaatgctttaatggcaacttcgaaacgtacttggtcattccctttaccagtacaaccatgtgcaatacctactgaatttgttttctcagcaatctctactaattttttagcgattaatggtcttgataaagctgaaactaatggatatgcattttcatacattaaatttcctttgattgcataacttacatactcatcactaaattcttttgttgcatcaataatatgacattcaactgctcccatatctaaagcttttttataaacgatgtctaaatctttaccttcaccaacatctaggcaacaagctacaacgtcgtatcctttgtcgataagccattgaacggccacacttgtatctagtcctcctgaatatgctaaaacaattttctctttcataaaattcacctcattgtagttatctgaatatttcgtatgaacacatgatagcaaacttttaatgaaaataaaaccattattttacatatttattcataaaatacgatagagatagttagagttgtaagtataaatgcttatttatcaatgtttaaaagtattttaaaaaacatgcaaattgtataaaaaatgtttgagtgtttgacgccagtttgaaatgtttgttgaaaaataggtgtgaaacgtcacataaatatcaattttattgattaagtacaaacttgtgaattgaatcgcaaacgtaaacttagtaaaattaagatattaaatgaaacaggaggcttttatagatgactcatattcaattagattttagtaaaacgttagaatttttcggtgaacacgaattaaaacaacaacaagaaattgttaaatcaattcacaaaacaattcatgaaggtactggtgcaggtagtgacttcttaggctgggttgatttaccagttgattacgacaaagaagaattttcaagaattgttgaagcatcaaaacgcattaaagaaaattctgatgttttagtagtcatcggtattggtggttcttacttaggtgcacgtgcagcaatcgaaatgttaacgtcatcatttagaaacagcaatgaataccctgaaattgtatttgttggtaatcacttatcatcaacatatacgaaagagttagttgattatttagcagacaaagatttctctgtaaacgttatttctaaatctggtacaactacagaaccagcagttgcatttagattgttcaaacaattagttgaagaaagatacggtaaagaagaagcacaaaaacgtatatttgcaacaacggataaagaaaaaggtgctttaaaacagttggctacaaacgaaggttatgaaacgtttatcgtacctgatgatgtaggtggaagatattctgttttaacagcagtaggattattaccaattgcaacagctggaattaacatcgaagctatgatgattggtgctgcaaaagcacgtgaagaattatcttcagataaattagaagaaaacattgcataccaatatgcgacaattcgaaacattttatatgcaaaaggttatacaacagaaatgttgattaactatgaaccatctatgcaatactttaatgaatggtggaaacaattatttggtgaatcagaaggtaaagacttcaaaggtatctatccttcaagtgccaactacacaactgatttacattctttaggtcaatatgtacaagaaggccgtcgcttcttattcgaaacagttgtaaaagtaaatcatcctaaatatgatattactattgaaaaagatagtgatgatctagacggattaaattatttagctggtaaaacaatcgacgaagttaacacaaaagcattcgaaggtacattattagcgcatactgatggtggtgttcctaacatggtagtgaacattccacaattagatgaagaaactttcggttacgtcgtatacttcttcgaacttgcttgtgcaatgagtggataccaattaggcgtaaatccatttaaccaacctggtgtagaagcatataaacaaaacatgttcgcattattaggtaaacctggttttgaagacttgaaaaaagaattagaagaacgtttataaaatacattacttcaaagattagtgaagtttgaaaagatagaactagacgttaactatttaaagcatattttcgaggttgtcattacaaatgtaaaaatgtaatgacaacctcgtttttatttatatgcaagaactaggttactagctaatgtgacaagatgttaagagaaaattaaagataaaataatatctgccttacaataatattgttatactactagagactgatttattagcatgattacatgttaatgtttctttacttagtaattaactttataatgtaagaataattatcttcaaccaaagaaagggattgatgatttgtcgtttcatcaagtagaagaatggtttgagatatttcgacagtttggttatttacctggatttatattgttatatattagagctataattccagtatttcctttagcactctatattttaattaacattcaagcttatggacctattttaggtatattgattagttggcttggattaatttctggaacatttacagtctatttgatctgtaaacgattggtgaacactgagaggatgcagcgaattaaacaacgtactgctgttcaacgcttgattagttttattgatcgccaaggattaatcccattgtttattttactttgttttccttttacgccaaatacattaataaattttgtagcgagtctatctcatattagacctaaatattatttcattgttttggcatcatcaaagttagtttcaacaattattttaggttatttaggtaaggaaattactacaattttaacgcatcctttaagagggatattaatgttagttgtgttggttgtattttggattgttggaaaaaagttagaacagcattttatggggtcgaaaaaggagtgacatcgtgaaaaaagttgtaaaatatttgatttcattgatacttgctattatcattgtactgttcgtacaaacttttgtaatagttggtcatgtcattccgaataatgatatgtcaccaagccttaacaaaggggatcgtgttattgtaaataaaattaaagttacatttaatcaattgaataatggtgatatcattacatataggcgtggtaacgagatatatactagtcgaattattgccaaacctggtcaatcaatggcgtttcgtcagggacaattataccgtgatgaccgaccggttgacgcatcttatgccaagaacagaaaaattaaagattttagtttgcgcaattttaaagaattagatggagatattataccgcctaacaattttgttgtgctaaatgatcatgataacaatcaacatgattctagacaatttggtttaattgataaaaaggatattattggtaatataagtttgagatattatcctttttcaaaatggacgattcagttcaaatcttaaaaagaggtgtcaaaattgaaaaaagaattattggaatggattatttcaattgctattgcgctagttatatttgctataataggtaaatttattgttacaccatatacgattaaaggtgaatcaatggatccaactttgaaagatggcgagcgagtagctgtaaacattattggatataaaacaggtggtttggaaaaaggtaatgtagttgtcttccatgcaaacaaaaatgatgactatgttaaacgtgtcatcggtgttcctggcgataaagtagaatataaaaatgatacattatatgtcaatggtaaaaaacaagatgaaccatatttaaactacaatttaaaacataaacaaggtgattacattactgggactttccaagttaaagatttaccgaatgcgaatcctaaatcaaatgtcattccaaaaggtaaatatttagtgcttggagataatcgtgaagtaagtaaagatagccgtgcgtttggcctcattgatgaagaccaaattgttggtaaagtttcatttagattctggccatttagtgaatttaaacataatttcaatcctgaaaacactaaaaattaatatgaaacaaataaaacatcgtttgtcggttttaatactgataaacgatgttttattttgttagtaccacaataaaagctaagttcgaaatgaacttataataaatcaatcacaatcactttgtgttaaaatatgtgtcaaaggaagtgagggtttgtcatgacattacatgcttatttaggtagagcgggaacaggtaagtctacgaaaatgttaactgaaataaaacaaaaaatgaaacaggatccactcggcgatccaatcattttaattgcgccaactcaaagtacatttcaattagaacaagcctttgtcaatgatccggaattaaatggtagtttaagaacagaagtgttgcattttgaacgattaagtcatcgtattttccaagaagttggtagttatagcgaacaaaagttatctaaagctgcaacggaaatgatgatttataacattgttcaagaacaacaaaagtatttaaaactttatcaatcacaagcaaaatattatgggtttagtgaaaaattaacagaacaaattcaagattttaaaaaatatgcagtaacgcctgaacatttagaacactttattgctgataaaaatatgcaaactcgaactaaaaataagttagaggatattgctttaatataccgtgagttcgaacaacgcattcaaaacgagtttattacgggtgaggattcattacaatattttattgattgtatgccgaaatcagagtggctaaaacgtgctgatatatatattgatggttttcacaacttttcaacgattgagtatttaataatcaaaggattaattaaatatgcgaagagtgtcacaattatattgacgacagatggtaaccacgatcaatttagtttatttagaaaaccatcggaagtgttacgacatattgaagaaatagcaaatgaactcaatatttctattgaacgtcaatatttcaagcatttatatcgcttcaataatcaagatttaaagcatcttgaacaagaatttgatgcacttcaaatcaatcgagtggcatgtcaaggtcatatcaatattttagaatctgcgactatgagagaggaaataaatgaaattgcgcgacgtatcatcgttgatattcgtgataagcaattacgatatcaagatattgcaattttatatcgtgacgagtcttatgcttatttatttgattccatattaccgctttataatattccttataacattgatacaaagcgttcgatgacacatcatccggtcatggaaatgattcgttcattgattgaagttattcaatctaattggcaagtgaatccaatgctacgcttattgaagactgatgtgttaacggcatcatatctaaaaagtgcatacttagttgatttacttgaaaattttgtacttgaacgtggtatatacggtaaacgttggttagatgatgagctatttaatgtcgaacattttagcaaaatggggcgtaaagcgcataaactgaccgaagatgaacgtaacacatttgaacaagtcgttaagttaaagaaagatgtcattgataaaattttacattttgaaaagcaaatgtcacaagcggaaactgtaaaagattttgcaactgctttttatgaaagtatggaatatttcgaactgccaaatcaattgatgacagagcgagatgaacttgatttaaatggtaatcatgaaaaggcggaggaaattgatcaaatatggaatggcttaattcaaatccttgatgacttagttctagtatttggagatgaaccaatgtcgatggaacgtttcttagaagtatttgatattggtttagaacaattagaatttgttatgattccgcaaacattggaccaagtaagtattggtacgatggatttggctaaagtcgataataagcaacatgtttacttagtaggtatgaatgatggtacgatgccacaaccagtaactgcgtcaagcttgattacagatgaagaaaagaaatactttgaacagcaggctaatgtcgagttaagtccaacatcagatattttacagatggatgaagcatttgtttgttatgttgctatgactagagctaagggagatgttacattttcttacagtctaatgggatcaagtggtgatgataaggagatcagcccatttttaaatcaaattcaatcattgttcaaccaattggaaattactaacattcctcaataccatgaagttaacccattgtcactaatgcaacatgctaagcaaaccaaaattacattatttgaagcattgcgtgcttggttagatgatgaaattgtggctgatagttggttagatgcttatcaagtaattagagatagcgatcatttaaatcaaggtttagattatttaatgtcagcattaacgtttgacaatgaaactgtaaaattaggtgaaacgttgtctaaagatttatatggtaaggaaatcaatgccagtgtatctcgttttgaaggttatcaacaatgcccatttaaacactatgcgtcacatggtctgaaactaaatgagcgaacgaagtatgaacttcaaaactttgatttaggtgatattttccattctgttttaaaatatatatctgaacgtattaatggcgattttaaacaattagacctgaaaaaaataagacaattaacgaatgaagcattggaagaaattttacctaaagttcagtttaatttattaaattcttcagcttactatcgttatttatcaagacgcattggcgctattatagaaacaacactaagcgcattaaaatatcaaggcacgtattcaaagtttatgccaaaacattttgagacaagttttagaaggaaaccaagaacaaatgacgaattaattgcacaaacattaacgacaactcaaggtattccaattaatattagagggcaaattgatcgtatcgatacgtatacaaagaatgatacaagttttgttaatatcattgactataaatcctctgaaggtagtgcgacacttgatttaacgaaagtatattatggtatgcaaatgcaaatgatgacatacatggatatcgttttacaaaataaacaacgccttggattaacagatattgtgaaaccaggtggattattatacttccatgtacatgaacctagaattaaatttaaatcatggtctgatattgatgaagataaactagaacaagatttaattaaaaagtttaagctgagtggtttagtgaatgcagaccaaactgttattgatgcattggatattcgtttagaacctaaattcacttcagatattgtaccagttggtttgaataaagatggctctttgagtaaacgaggcagccaagtggcagatgaggcaacgatttataaattcatccaacataacaaagagaattttatagaaacagcttcaaatattatggatggacatactgaagttgcaccattaaagtacaaacaaaaattgccatgtgctttttgtagttatcaatcggtatgtcatgtagatggcatgattgatagtaagcgatatcgaactgtagatgaaacaataaatccaattgaagcaattcaaaatattaacattaatgatgaatttgggggtgagcaatagatgacaattccagagaaaccacaaggcgtgatttggactgacgcgcaatggcaaagtatttacgcaactggacaagatgtacttgttgcagccgcggcaggttcaggtaaaacagctgtactagttgagcgtattatccaaaagattttacgtgatggcattgatgtcgatcgacttttagtcgtaacgtttacaaacttaagcgcacgtgaaatgaagcatcgtgtagaccaacgtattcaagaggcatcgattgctgatcctgcaaatgcacacttgaaaaaccaacgcatcaaaattcatcaagcacaaatatctacacttcatagtttttgcttgaaattaattcaacagcattatgatgtattaaatattgacccgaactttagaacaagcagtgaagctgaaaatattttattattagaacaaacgatagatgaggtcatagaacaacattacgatatccttgatcctgcttttattgaattaacagagcaattgtcttcagatagaagtgatgatcagtttcgaatgattattaaacaattgtatttctttagcgttgcaaatccaaatcctataaattggttggatcaattggtgacaccatacgaagaagaagcacaacaagcgcaacttattcaactactaacagacttatctaaagtatttatcacagctgcctatgatgctttaaataaggcgtatgatttgtttagtatgatggatagcgtcgataaacatttagctgttatagaagatgaacgacgtttaatggggcgtgttttagaaggtggctttattgatataccttatttaactggtcacgaatttggcgcgcgtttgcctaatgtaacagcgaaaattaaagaagcaaatgaaatgatggtcgatgccttagaagatgctaaacttcaatataaaaaatataaatcattaattgataaagtgaagagtgattacttttcaagagaagctgatgatttgaaagctgatatgcaacaattggcgccacgagtaaagtaccttgcgcgtattgtgaaagatgttatgtcagaattcaatcgaaaaaagcgtagcaaaaatattttggatttttctgattatgaacattttgcattacaaattttaactaatgaggatggttcgccttcagaaattgccgaatcataccgtcaacacttccaagaaatattggtcgatgagtatcaagatacgaaccgagttcaagagaaaatactatcttgcatcaaaacgggtgatgaacataatggtaatttatttatggttggagatgttaagcaatccatttataaatttagacaagctgatccaagtttatttattgaaaagtatcaacgctttactatagatggagatggcactggacgtcgaattgatttgtcgcaaaacttccgttctcgaaaagaagtactgtcaacgactaactatatattcaaacatatgatggatgaacaagtcggtgaagtaaaatatgatgaagcggcacagttgtattatggtgcaccatatgatgaatcggaccatccagtaaacttaaaagtgcttgttgaagcggatcaagaacatagtgatttaactggtagtgaacaagaagcgcattttatagtagaacaagttaaagatatcttagaacatcaaaaagtttatgacatgaaaacaggaagctatagaagtgcgacatacaaagatatcgttattctagaacgcagctttggacaagctcgcaatttacaacaagcatttaaaaatgaagatattccattccatgtgaatagtcgtgaaggttactttgaacaaacagaagtccgcttagtattatcatttttaagagcgatagataatccattacaagatatttatttagttgggttaatgcgctccgttatatatcagttcaaagaagacgaattagctcaaattagaatattgagtctaaatgatgactacttctatcaatcgattgtaaattacattaatgacgaagcagcagatgctattttagttgataaattaaaaatgtttttatcagatattcaaagttaccaacaatatagtaaagatcatccggtgtatcagttaattgataaattttataatgatcattatgttattcaatactttagtggacttattggtggacgtggacgacgtgcaaacctttatggtttatttaataaagctatcgagtttgagaattcaagttttagaggtttatatcaatttattcgttttatcgatgaattgattgaaagaggcaaagattttggtgaggaaaatgtagttggtccaaacgataatgttgttagaatgatgacaattcatagtagtaaaggtctagagtttccatttgtcatttattctggattgtcaaaagattttaataaacgtgatttgaaacaaccagttattttaaatcagcaatttggtctcggaatggattattttgatgtggataaagaaatggcatttccatctttagcttcggttgcatataaagctgttgccgaaaaagaacttgtgtcagaagaaatgcgattagtctatgtagcattaacaagagcgaaagaacaactttatttaattggtagagtgaaaaatgataaatcgttactagaactagagcaattgtctatttctggtgagcacattgctgtcaatgaacgattaacttcaccaaatccgttccatcttatttatagtattttatctaaacatcaatctgcgtcaattccagatgatttaaaatttgaaaaagatatagcacaagttgaagatagtagtcgtccgaatgtaaatatttcaattatatactttgaagatgtgtctacagaaaccattttagataataatgaatatcgttcggttaatcaattagaaactatgcaaaatggtaatgaggatgttaaagcacaaattaaacaccaacttgattatcaatatccatatgtaaatgatactaaaaagccatcaaaacaatctgtttctgaattgaaaaggcaatatgaaacagaagaaagtggcacaagttacgaacgagtaagacaatatcgtatcggtttttcaacgtatgaacgacctaaatttctaagtgaacaaggtaaacgaaaagcgaatgaaattggtacgttaatgcatacagtgatgcaacatttaccattcaaaaaagaacgcatatctgaagttgagttacatcagtatatcgatggattaatcgataaacatattatcgaagcagatgcgaaaaaagatatccgtatggatgaattaatgacatttatcaatagtgagttatattcgattattgctgaagcagagcaagtatatcgtgaattaccgtttgtagttaaccaagcattagttgaccaattgccacaaggagatgaagacgtctcaattattcaaggtatgattgacttaatctttgttaaagatggtgtgcattattttgtagactataaaaccgatgcatttaatcgtcgtcgtgggatgacagatgaagaaattggtacacaattaaaaaataaatataagatacagatgaaatattatcaaaatacgcttcaaacgattcttaataaagaagttaaaggttatttatacttcttcaaatttggtacattgcaactgtagtattttgattttcaaaagaataaaaaataatttcgattaagtgcaaagcccatgtagcagaatgaacacaactcattttcaaaattgtcttacttatttatttgttatttgataacgaaaaaagttataatgtgaattaagataaagatgaggagttgagaatgaatgaaattcttatcattcaagtataatgacaaaacttcatatggcgttaaagtaaaacgcgaagatgctgtatgggatttaacacaagtatttgctgactttgcagaaggagatttccatcctaaaacattgttagctggtttacaacaaaatcatactttagattttcaagaacaagtacgtaaagcagttgtagcagcagaagatagcggcaaagctgaagactataaaatttcatttaatgacattgaattcttaccaccagtaacacctccgaataatgtgattgcttttggtagaaattacaaagatcatgcgaacgaattaaatcatgaagtagaaaaattatatgtatttacaaaagcagcgtcatctttaacaggagataatgcaacaattccaaatcataaagatattactgatcaattagattatgaaggtgaattaggtattgttattggtaagtctggtgaaaagattccaaaagcattagctttagattatgtttacggctatacaattattaacgatatcactgatcgcaaagcacaaagtgaacaagatcaagcatttttatcaaaaagtttaactggcggttgcccaatgggtccttatatcgttactaaagacgaactaccattacctgaaaatgtaaatattgttacaaaagttaacaatgaaattagacaagatggtaacactggcgaaatgattcttaaaattgatgaattaatagaagaaatttcaaaatatgttgcactacatccgggagatattattgcaactggtacaccagcaggcgttggtgcaggtatgcaaccacctaaatttttacaaccaggtgatgaagttaaagtgactattgataatattggaacactgacaacttatatcgctaaataattatcatttaaaaagcgaggctgggacataaatccctaaaaaacagcagtaagataattttcaattagaaaatatcttactgctgttctctatttatacaatacttcgtattgaatggcttcgctttcctagggtgccgtctcagcctcggtcttcgactggcactgctccctcaggagtctcgccattaatactacgtattaacatgtaattttactttgaaatactttaatgcccaaattaatcaaaagctttttgaaccagaaacgaaaaaaatcaatagtcaaagaaaaattgatgtagagcctgtttttggatttgtgaaggctattttgggtttcactagaatgtcagttcgaggaataaataaagttaaacgagagctaggttttgtattaatggtacttaatataaggaaaatagcagctcaacgagctgtacattataaaatacatatcaaaaaagctgatttctatcaaataattaatagaaaacagcttttttaaattgcctaagaacttaatgtcccagcctggttttttcttgcttttctaaaaaggtgttaaagataattgtttataatgttaccattttgagatgaaagtgaaatattgatattaagaagtagttgattattttacagcagatgcacaatattctaataaggaataaaatgtcatgttcttcctctcaaatatagaagtgtggtagaatatatattcgtgtataatcaaatcatgattaaattacaagcaagtgggtattaatcccaagaagctttaatttaataatataaattattaaagtgggggggatcagtatgttacatttacatatattaagttgggtattagcgattattttatttatcgctacatacttaaacatttcaaaaaatcaaggtggtacgccatatttcaaaccgttgcacatgattttacgcttatttatgctgttgacgttaatttcaggattttggatattaattcagtcatttatgaatggcggggcaaatcatatgttgcttacattgaaaatgctgtgtggtgttgcagtagttggattgatggaagtgtcgattgctaaaagaaagagacatgaacaaagtcacacaatgttttggataacaattgcattaattatcatcacaatggtattaggtgtcattctaccgttagggcctatatcaaaattattcggtattggctaattgataagacatatagtatatgacataaggcatggacaattattagtccaagaccttatgtcttttttgattctaaaaatgttaaacataaaaaatggactggatagtagtaccagtccaacataattctaacctagacaattaagattagattgaatcgcatgattcatttatttagctttgtaaccaatcatattgattaaatctttagggtggctatatggtggtgcataagccacttcaaactcagttaactcatctacagttagctggttcatcattgccatcgatagtacatcaatacgtttatctgcaccttcttttcctactgcagctgctcttaaaatctgacggtttgaagtgtcataatatacccttaagtgtaaaggggaatttcctgggtaataattcgcgtgtgcaccttgagtgacttccaccattttatagtcaaattgctttagttcatttggtttaacgccgacactcgcaaatgtataatcaaagaacttcacaatattgttgcctaagaagcctttgaattcaatagtgtcatttccagcaatttgttcggcaacaatacttgctgcacggtgagcgccccaagctaaaggaacactagccggtagatcgacatgtcgataatgtgatgttgcaatatcgcctattgcataaatgtttggaacatttgtttcaaatttatcgtttaccggtatgaaaccttttcgatcaagtttgatatttgaactttcgataaattttgaattggggtgagtaccgacaccttcaataatcatatcgtaatgttcaacttttcctgatttaaatgtaatttcatttccattgatagcatcaatttcctcatttaaacggtatggaatctccagcttatctaattcatcaagtataggttgattcatgtcagcatccattaatttatttatcttatcagatcgatgaattaaagtagggtgtaaaccacgttcgtaaagattttcaagaacttctaatgaaacataccctgcacctacaactaatactttatcaacttgatttgctttgatgaattgatcgatagcatcagtgtcttctaaatttctaagtgtaaatgtaatatcactttcaaagccaaggctatttgcacttgcaccagggcttaaaatgagtttatcgtaagattcttcaaattgttcgttggtctttctatttaatacagttacagtttgtctttcatcattgattgcaataacttcatgataagtttttactgtaatttgctttctatcataaaatttttcaggtgtatacgctaaagcatattttctatcttcaacaacttcgccaatgacataaggcaatgcacaattagcaaagctcatatcacgatctttttcaaaaataataatgtcactttctttatctaaacgtcgaatttggctggcacatgttgcaccgccagcgactgctccgactacgactattttgggcatcgtaacttacctcctattgttttaaaatattataaaatgattagttataaattaacagtaatatctaatatttaaattaaagaaatcatttaaatatcgaccaatgccatcttcattattgttgaatgtaatattgttcgctacatctttaagttcttgcaaaccattttccatagcaacaccatggcgggcgtactcaatcatttcaatatcattatcttcatcaccgaatgcaataatattatttcggtcaatatttaaaaattgtctaacttgctcaatgcctcttgctttattaataccaagttttacaatttcaatgacagggaatggtgcgccccagcgtcgatgctcaatatgatcggcataaaaatgagtaagcatatttttgatttcaggtattttactttcttcggcttcaattaaaattgaggtaggggattctttcaagtggacaagtaaattaccagtttgaattcttggattacccattgaaaaaccttcaaataatcttggatcatgattgttaatgaaaacataatctttcacttctgctataatattcgatacttgatattgttgtaatccttgaataatgttttgtgcgatgcctaaatctaaaatttcatggcaagttttgaagtttttatctttagggtgatgtacgtaagcgccattaaaattaacaattggtgtcgttaaatttaattcatgataatacatttgacttgcacgataaggtctgccagtcgcaatcataatttggtgtccacgttgttgtaattcatttaatacttgtttagtatatgatgaaatttctttgttatcgtttaataatgttccgtctaagtctagacatattaaatgtggttgcatatctctctcctcataagttgcttagttcatatagatacatcatagcattttattggcgttttgtcggatatttgatatattatgaataatatgacattaaagaggtgatatggatggaagaggcattgaaagatagtatcttaggtgcattagaaatggtaattgaccctgaattaggaattgatatcgttaatttaggtttagtatacaaagtgaatgttgatgatgaaggcgtatgtacagttgatatgactttaacatcaatgggatgtccaatgggacctcaaattattgatcaagttaaaacagtattagcagagattcctgaaatacaggatactgaagtgaatatcgtatggagtccaccttggacaaaagatatgatgtcacgttacgctaagattgcacttggtgtgagctaacataaacgtgcattgcctgtagaatttcttttagaaattctctgtgttgggtccccgcagtcaatataacattgtagagtataattcattgtgaataagctcccttcaaagtagacattgaaaaatgaaaattttgaagggagccttatttatgttctaggttctgatttcattttgaaaatttatatctaacttgtttcaaaaaatatgaattaagacagtgacttgcacttctaagagtgcgcaattcattttctagttgaatattttcttgaaaatttttataataaattgaatttatattacagttatattacaatacataatacttcatagtttttaagttgccgagttgcattacaaattggatttcgaagtaagaatcatcattggtaatttttttaatttaacagtattttagtcaatatgattttgatgatgtcgtaattcaataatatacatatgcatttcaatattcttttaaacagcataactaaatttaattaagcatctaagaagaacagttttaaaagggaagaatgcaaaaatgaacaaaacaaagggttttacaaagtataagaaaatgagatatatgccagggctcgatggtttgagggcaatcgctgttctaggaattattatttaccacttaaacaagcaatggttgacaggtggctttttaggtgtggatacattttttgtgatctctggttatttaattacaagcttattactcaaagagtatgatgacacaggtatcattaaattgaaaagcttttggatacgtcgtttaaaacgtttattaccagcagtcatagttttattaatggttgtagggacagcaaccttattattaaaatcagataatatcattagggttaaacatgatattattgctgcgatattttatgtatcaaactggtggtatatagcaaaagatgttaattattttgagcaattttcatttatgccattaaagcatttatggtctttagcaattgaagaacagttttacatatttttcccagttattttggttacattattgttaacaattaaaaagcgatacaaaataggatttattttttggggagtatcaataatttctttagggttaatgatgtttatctacagtattaatggggatcattcacgagtgtattttggtacagatactagattacagacattgttactgggtgttattttagcttttttatggccaccgtttaaattgaaaaatgatccacctaaagttgtaaaatatgttattgatagcataggtagtttatcatttatagtacttatattattatttttcattattaatgatgagacgaattggatatatgatggtggtttctatttaatatccatattaacgttatttattattgccagtgtcgttcatccatctacatggatagcgaagatattttcaaatccagtgttagtatttatcgggaaaaggtcttatagtttatatttatggcattttgcagtaattagtttcgtacatagttactatgtagatggacagatacctgtatatgtgtactttatagatataagtttaacaattatatttgcagagctatcatatcgctttatagaaactccatttagaaaagaaggtattaaagctttaaattggcgaccttcttatataccacaatttataagaatggcaattgtagtaaccttgttaattccatttatgttgattttagtaggtgcattcaataaatatggtaaagacattattggagaaaaagcgaatagctttgataccactattgaagataattatttaatgcggatagcaccaattgataacattcacattgatggcttagtaagtgagaagaaaaaggaatcttccgacgtatataataatattaaacctcttttaatcggtgattcagtaatggttgatatcggtgagtcatttaagtcatcagttcctaagtctagaattgatggaaaagtagggcgtcaattgtatcaaaccttacctttagttaaagcgaattattcacaatataaaaaatcatctgatcaagtcgtattagaattaggtacaaatggcgactttactgtcaaacagctcgacgatttacttaatcaatttggaaaagccaagatttatttagttaatacacgtgttccaagaatttatgaggcaaatgtaaatcgattattagctgacgcggcgaaacgaaagtccaatgtcacattaattgattggaataagcgatcacaaggacatagtgaatattttgcaccagacggtgtacatttagagtacaaaggagtcctagctttaaaagatgaaatattaaaagcacttaaaaagaaataacatatgtttaataagtctagttaatgtgtaacgtaacattagctagatttttttattcaaaaaaatatttacaaatattaggaaatttaagtgtaaaagagttgataaatgattatattgggactataatataattaaggtcaaagaaagtcaaagtcaaaagtgcaacttgaccaactctacaaattagaggtgaaattatatggatataaataaaatgacatatgctgttcaaagtgctttacaacaagcagttgaactgagtcagcaacataaattacaaaatatagaaattgaggcaattttaagcgctgccttaaatgaaagtgaaagcttatataaaagtattttagaacgagcaaatattgaggtagatcaattaaacaaagcttatgaagacaaactaaacacgtatgcatctgtagaaggtgacaatatacaatatggtcaatatattagccaacaagcaaaccaattgataactaaggctgaatcatacatgaaagaatatgaagatgaatatatttcaatggagcatattttacgttcggcaatggacattgatcaaacaacaaaacattatataaataataaagtagaagttatcaaagaaattattaaaaaagtaagagggggaaatcacgtgacatcacaaaatccagaagttaattacgaagcattagctaaatatggccgcgacttagtagaagaagttagacaaggtaaaatggatcctgttataggaagagatgaagaaattcgaaatacgattcgtattttaagtcgtaaaactaaaaacaaccctgtgctcattggtgaaccaggtgttggtaaaactgcaattgttgaaggattagcgcaacgtatagttaagaaagatgtgccagaatcattattagataaaactgtttttgagttagatttaagcgcattagtagcgggcgctaaatatcgtggtgaatttgaagagagattaaaagcagtcctaaaagaagttaaagagtctgatggtagaattatattatttattgatgaaatccatatgcttgtaggtgctggtaaaacagatggtgccatggatgcaggcaacatgctaaaaccaatgttagcacgaggagagttacattgtattggtgcaacaactttaaatgaatatcgagaatatattgaaaaagattcggcattagagcgtcgtttccaaaaagtagcagttagtgagcctgatgttgaagatacaatttcaattttacgtggtttaaaagaacgatatgaagtgtatcatggtgtgcgtattcaagatagagccttagttgctgccgctgaattgtctgatcgttacatcactgatcgttttttaccagataaagcgattgatttagttgaccaagcatgtgcaacaattcgtacggaaatgggatcaaatccaactgaattggatcaagttaatagacgtgtcatgcaattagaaattgaagatagcgcacttaaaaatgaatctgacaatgcgagcaaacagagattacaagaactacaagaagagcttgccaatgaaaaagagaaacaagcagcacttcaatctcgtgtagaatcagaaaaagaaaaaatagcaaatttacaagaaaaacgtgcgcaactagatgaaagtagacaagcgttggaagatgcacaaacaaataacaatttagaaaaagctgctgaactacaatatggaacaattcctcaattggaaaaagaacttagagaattagaggataatttccaagatgagcaaggtgaagatacagatcgaatgattcgtgaagttgtaacagacgaagaaattggcgatattgtcagccaatggacaggcataccagtttcaaaattagttgaaacagaacgtgaaaaattacttcacttaagtgacatcttgcataaacgtgttgtaggtcaagataaagcagttgacctggtttcagatgcagtagttagagcaagagcaggtattaaagatccaaacagacctattggtagtttcttattcctaggtccaactggagtaggtaaaactgaattagctaaatcattagctgcatcattatttgattctgaaaaacatatgattcgtattgatatgagtgaatatatggaaaaacatgcagtatcaagattgataggggcacctccaggatatattggacatgatgaagggggtcaattaactgaagcggttcgtcgtaatccatactcagttattttattagatgaggttgaaaaagcgcatactgacgtctttaatgtattattgcaaattttagatgaaggccgtttaactgattctaaaggacgtagcgttgattttaaaaatactattattattatgacaagtaatattggatctcaagttttattagaaaacgtaaaagagactggtgaaattacagaatcaacagaaaaagctgttatgacaagtttaaatgcatatttcaaaccagaaattttgaatcgtatggatgatatcgtattatttaaaccattatctattgatgacatgagtatgattgtagataaaatcttaacgcaattaaatataagattattagaacaacgaatctcaattgaagtttctgatgatgctaaagcttggctaggtcaagaagcttatgaacctcaatacggtgcaagaccattaaaacgttttgtacaacgccaaattgaaacaccattagcacgtatgatgattaaagagggattcccagaaggtacaacgattaaagttaatttaaattcagacaataacttaacgtttaatgttgaaaaaattcatgaataaaattgaaccaagaatgtgatgattaatcgcattcttggttttttagatttgaaatttattataattgttcattggcaatatactttttaaatgatttaataaacaccaatatttctgggctttcttttttgctgtatatatatgtaaatgaaataggtgcttgtaaaattttcgtgttaataaccgaaatattgtaatcactatttgttgttatataaagaggcaggaatgatataccttgattcatttcgattaatttaattgaagtatgcacatcattgatagatagaaattgtgctttttcataaatatttaaaatattatttttaagtgatgaccaatattctggatggttatcacttattattttgtatttttcaaataaagatgcctcagttagaagatgattattctctttattgggagcaatcaatacaattttaccttcgcatactttttcagaatgaacttctcttagtttaggttgatttctgctaatcccgatgtcatacgtatgattattaatatctttttcaatattttcatttttgacatgaagagaaacatcgataaaaggatgctcgttaaagaaagattttaaaaatttgggcataatgaatgtcgcgatatatgaagacacgacaacatttaatttcgattgaaacatcgtttttttaagttggatatgtttgatgccactttcatattgttcaataaaactttgcgcaattggaagaaatgtatgaccatcttcagtcaagataatttgatttttataagtttcaaatagtttcacattgagatgctgttctaaatttttaatttgcttatgtatagaaggtatagtgagattaatttcttcactagctaatcgatagtttaacgtcttcgctaaaatgacaaatgtatagtaccaatctaaattcatgaacttacctctttcaaaaaagttaataattcattagataatatttaatttttattgcataaaaataatattaatattatatcagaggttatcgagggggtgaagtaatatgattcgaattcaagataatacaataagggatggtatgcaacaaagtaatgttcgaaaaagtctaattataaaaaaagaagtattgaaacaaattaacaagttaaatataaattctgttgaagtaggcatgtgtacaactatcgaggatgaatttaatattcatcaattcagagacattttaagtcctgaaaaagaattagtagtattgactaggcttaatgaaaaagaaataaaaaaaatagtcaaattgaaaattcataatttagtggtaaaaatactattgccaatatctgacttgcatataaaagaaaagcttaatttttcaaataaatattatattcagaaaatcaaagactgcttggatatattaaagaaagataaaaaaggagtagatatttgttttgaagatgcaacaaggacttctagagaaaaattgaaagaatacatggaaattatttcaaaatatcaagttagaacagttacatttgcggacactgtaggatgttcgacaccattagaatacggagatatttttaattactttgtaaaaaaatattctaacataattttttctgctcattgtcataacgatctagggttggctactgcaaatacattagctgcaattttaaatggtgcaaagcaaatagaaactacatttttgggaattggtgagagagcgggtaatgcttctattgaggaaataattactattttgacaaaaaaacaaatagaaagtacggaattcactttacccgacgtatataaaactagtattaatatttctaaaattctcgattttcaaatatcagaaaacaaacctataattggtgaaaatatatttaaacatgaatcaggaattcatcaagatggttctaaaaaaaatataaatatgtatcaatatttagttcctagtgatttaggattgaaaaattcacaagttgttcagtttccaataagtaatatttctagtaagaaaatcttgcacaataaatttaaatcaatagttaacactgaagaaattgatgaaagtatttctttctataaacttgtgaacaagttttcacctgaagtagcacctgaagatacagtggatttacttcagataataaaaaggaggagtaaagatggaaattttaaatgattctgtaaaaagttttgaaaaactttatttacaattacaagatggttttccagtgattgttcctactgatactaattataatttatgtagtttacctaacaacgatctttgtatcgataaaatatttgaatataaaaagcgatcgaaagataagccattatcattatttattgataagccagaggattggaaattgtatggagataatcaaaatacggaaatagttgataaactagttgaaatattttggcctggaccattaaatattattttaaaaaataaaacaagctataattatatgctcaataattcagatagtatagctataggatgtgtacaaaataaaacgatgagaagatttatttcatatattaattcacctatagcaattacttcagcaaatatatctggaactgccgatgatattttaataactgaaaatgaagcaattaagcacatgggcgaaaatgtaagatatatgctaagaagtcaaaataaaactaactataaaacatctagtacgattattaaagtgacagataataaaattgaattattaagagaaggagatataaagtttgaagaaataaaagaaagactaggtacaggtattatttatgaataagttaatacttgggatttatttataccgaattttttcacgagcatacttttatttaccgtttttattaatttactttttgattcaaggttattccataatacaattagaaatattaatggcgtcttatggcattgcagcatttttattctctctatacaaagagaagtgttttaaaatttgtaacttaaaagattctaataaattagttgttagtgaaatattcaaaatcatcggtttattgttgttattatatcaaaatcaatatttaattttagtagtggcacaaatattattagggttaagttactcaatgatggcgggtgttgataccgcaataattaaaagaaatataacaaatgagaaatacgtacaaaataagtcaaatagctatatgttcctatcattattaatttcagggattataggtagttatctttatggaataaatattaaatggcctataataatgactagtatattttcaattctaacaattataattattcgatgcacattagttgaaaatagggaattaaatttaataggagaaacaaagggaaagataaagaaatttctaccagaagagaagttttggatattgcattattcttttttaagagcgttaatattaggattttttataggatttattccaattaatatatataatgatttaaaactgaataatttacaatttatttcagtattaacttgttacacagttatgggttttgtatcttcacgttatttaactaaatacttgaattataagtttgtgtcagaaatttgtttagtaatatttttaataatatatacatatcaaagtttcatagcagttactatttctatgatatttttaggtatttcttcagggttaactcgtccacaaactataaataaactttctagcagtagtaacttaagagtgatgcttaattatgcagaaacgttatattttatttttaatatcgcatttttacttatgggtggttacttatatacaataggaactattcaatacttaatattatttatttcgttattaatttttatatatttaataataatattttattttacaaggagagagcaacatgaaaataaaaactgaatttaaagggaacaatataccatatgaatacgcagcaggtgcagatgtgagtgattctattaacgggaatccaattaagtcatttccatttgaagtaattgaattaccggaagggactaaatatcttgcttggtctttaattgactatgatgcaattcctgtgtgtggctttgcatggattcattggagtgttgctaatgtaagtgttagtggcaattcaatttctataaaagcagatttatcaagaacaaagggtgactatgtacaaggtaaaaatagctttactagtgggttgttggctgaagatttttcagaaatagaaaatcactatgtaggacctacaccacctgatcaagatcatcaatatgaattaacagtttatgcgttagatcattctttaaatttgaagaatgggttctacttgaatgaatttttaaaagaagtaaatcaacataaaattgatcaaacaagtattaaccttataggaagaaaaatttaatactaaatatctcatcaatataaaaatgttcaattaaaagtacaaagaaacaaaggttttaatttatatattaggtacggcgttcgctataatgcaaagaagtaattaaatttaagaaatgtaaacttagttattgtaatgtgaatttatttgaaaaaatagaaagtattaacaattatagcttttacattaattaaaatttatttttaaaaacaagtaaacaatttacatacttataatttttgaaacttttcaatttgtgttatattgattttgtaagatactttaactcacaaaggagagagattatatgaaattaaaatcatttataactgtaactttggcactgggcatgatcgcaacgactggcgctactgtggcaggtaatgaggtatctgcagcagaaaaggacaaactaccggcaactcaaaaagctaaagaaatgcaaaatgttccatatacaattgcagtagatggcattatggctttcaatcaatcttacttaaatttaccaaaagatagccaattatcatatttagatttaggaaataaagttaaagctttattatatgatgaacgcggtgtaacacctgagaagattcgaaatgcaaaatctgccgtttacacgattacttggaaagatggtagtaaaaaagaagtggatcttaagaaagatagctacacagcaaacttgtttgattcaaattcaattaaacaaattgatattaatgtaaaaactaaataaacacttaaaattatcaaattcaacatgaagcatttaattttacagtgatgattataatataattgccttgatacaaagattactcgtaaatgacatctttgtattaaggctttttctaaatttaaaagtgatgggttagaggtcattgagctttaaaatattcaaaatacaaaacattaatggccaaaaataaaagccgcctttatctgggcagcttcaataataagaaagacatatttcattttatactaaatagttattgtgatgaatctttcggcggtttaattactgcagcaaaaattgctgtgaaaatcgtgaacaatactgccatgataattggattcactacatttaagctgtctccacctactaggctattaagtacaaagttaaccatttgcattaataataatgcccaaaagaatgttacgaggtgtttcatgtcattctacctccactttaattatatatattttattttaagtgaaagttagaaatttgtatagtaacatctcatatattttgaccatattatacagtttaaataaatgattttatctgaaaggctattctaatttaagcgcattaaaaccaatttcatattgaaatttgacgataataaagcattaaaattttattaactagtcaatattcctacctctgacttgagtttaaaaagtaatctatgttaaattaatacctggtattaaaaattttattaagaaggtgttcaactatgaacgtgggtattaaaggttttggtgcatatgcaccagaaaagattattgacaatgcctattttgagcaatttttagatacatctgatgaatggatttctaagatgactggaattaaagaaagacattgggcagatgacgatcaagatacttcagatttagcatatgaagcaagtataaaagcaatcgctgacgctggtattcagcccgaagatatagatatgataattgttgccacagcaactggagatatgccatttccaactgtcgcaaatatgttgcaagaacgtttagggacgggcaaagttgcctctatggatcaacttgcagcatgttctggatttatgtattcaatgattacagctaaacaatatgttcaatctggagattatcataatattttagttgtcggtgcagataaattatctaaaataacagatttaactgaccgttctactgcagttctatttggagatggtgcaggtgcggttatcatcggtgaagtttcagaaggcagaggtattataagttatgaaatgggttctgatggcactggtggtaaacatttatatttagataaagatactggtaaactgaaaatgaatggtcgagaagtatttaaatttgctgttagaattatgggtgatgcatcaacacgtgtagttgaaaaagcgaatttaacatcagatgatatagatttatttattcctcatcaagctaatattagaattatggaatcagctagagaacgcttaggtatttcaaaagacaaaatgagtgtttctgtaaataaatatggaaatacttcagctgcgtcaatacctttaagtatcgatcaagaattaaaaaatggtaaactcaaagatgatgatacaattgttcttgtcggattcggtggcggcctaacttggggcgcaatgacaataaaatggggaaaataggaggataacgaatgagtcaaaataaaagagtagttattacaggtatgggagccctttctccaatcggtaatgatgtcaaaacaacatgggagaatgctctaaaaggcgtaaatggtatcgataaaattacacgtatcgatactgaaccttatagcgttcacttagcaggagaacttaaaaactttaatattgaagatcatatcgacaaaaaagaagcgcgtcgtatggatagatttactcaatatgcaattgtagcagctagagaggctgttaaagatgcgcaattagatatcaatgataatactgcagatcgaatcggtgtatggattggttctggtatcggtggtatggaaacatttgaaattgcacataaacaattaatggataaaggcccaagacgtgtgagtccatttttcgtaccaatgttaattcctgatatggcaactgggcaagtatcaattgacttaggtgcaaaaggaccaaatggtgcaacagttacagcatgtgcaacaggtacaaattcaatcggagaagcatttaaaattgtgcaacgcggtgatgcagatgcaatgattactggtggtacagaagcaccaattactcatatggcaattgctggtttcagtgcaagtcgagcgctttctacaaatgatgacattgaaacagcatgtcgtccattccaagaaggtagagacggttttgttatgggtgaaggtgctggtattttagtaattgaatctttagaatcagcacaagctcgaggtgccaatatttatgctgagatagttggctatggtactacaggtgatgcttatcatattacagcgccagctccagaaggtgaaggtggttctagagcaatgcaagcagctatggatgatgctggtattgaacctaaagatgtacaatacttaaatgcccatggtacaagtactcctgttggtgacttaaatgaagttaaagctattaaaaatacatttggtgaagcagctaaacacttaaaagttagctcaacaaaatcaatgactggtcacttacttggtgcaacaggtggaattgaagcaatcttctcagcgctttcaattaaagactctaaagtcgccccgacaattcatgcggtaacaccagatctagaatgtgatttggatattgttccaaatgaagcgcaagaccttgatattacttatgcaatgagtaatagcttaggattcggtggacataacgcagtattagtattcaagaaatttgaagcataactataaaaatcttcagtaacgttgttttagttactgaagattttttcagtttctttatactaagatgagcgacagcacaatcgtcataataaaatataaaatatttattaataataaggggattatccatgtagaaacaaagtaatgctctttttttacctcttgtgggttgaaaaatggatcatcagagatagacttcttctttttcgaagatgacatttgatactttaatcttctaaaaccataacttgtcgcatcaaaaatgccttcttgtacaagtaaaatcaaaaatatgctaataaaaataattaatgaaacataaaacaatatatttaaatatgtaatgatagtatggctattaaaaagccatataataaacgttaatattggcgttattagtgccattccaagccattttttcaacatttgatcactcccacttatagaaaactcttacgcatagtttacattaaaatcagacattgaggaatgattttttaatttcttcagctttattgaaattctaaaatcaatcattcttcattagtttaaagcaaaaaaatattgatatatagtaaatattgtatatataatattagttaagatttcagaaaattttgaagggaatggaaatttagaaatcggaatttgttagaggaggggattagatggggaaatatattttcaaacgatttatttatatgcttatttctttatttattattattacaattacatttttcttaatgaaattaatgccaggttcgccatttaacgatgctaaattaaatgctgaacaaaaagaaattttaaatgaaaaatatggattaaatgatcctgtagctacgcagtatttacattatttaaaaaatgttgttacaggcgattttggtaattcattccagtatcataatcaacctgtgtgggatttgattaaaccgagactactaccttcttttgaaatgggtcttacagcaatgttcatcggtgtgatactgggacttattttaggtgttgcagcagctactaaacaaaattcttgggttgactatacaactacagttatttcagttattgctgtatctgtaccatcttttgtacttgctgtacttttacaatatgtatttgcagttaaattaagatggttcccagtagctggatgggaaggtttttcgaccgcggtattaccgtcacttgcattatctgcagctgttttagcaactgtcgccagatacataagagcagagatgatagaggtattaagttcagactatattttattagcgagagctaaaggtaattcgacaatgcgtgtactttttggacatgcacttagaaatgctttaattccaattattacaattatcgttcccatgttagcaagtattttaacaggcactttaacaattgaaaatatttttggggttcctggattaggggatcaattcgtacgttcaattacaacaaatgatttctcagtaatcatggcaatcacactattatttagcacactgtttatcgtttctatttttattgtagatattttgtacggtgtgatagatccacgaattcgtgttcaaggaggtaaaaaataatggctgaaaataaaaacaatttgtcgattaacgacgatcattctaatgcagctatgacgcatacctctgacgctatcgcatcatctgattttattattagagatttagatttgaatcaggaacctgaaatgcaacgagaaagcaaaaacttttggcaagatgcttgggctcagttaaaacgaaataagttagctgttgtcggtatgataggtttaattatcattgtaatatttgcttttatcggtccagttataaataaacatgattatgctgaacaaaatgtagaacatagaaatcttccggcaaaaatacctgtattagacaaagttccatttttaccttttgatggtaaagatgcagatggcaaggatgcttataaagcagcaaatgctaaagaaaattattggtttggtactgatcagttgggtcgagatttatggacaagaacatggaaaggtgctcaaatttcattgtttatcggtgttgttgcagcgatgttagatatttttattggcgttgtatatggtgcgatttctggattcttcggtggacgtgtcgatacgattatgcaacgtatacttgaagtcatagcatctattccgaatttaattgtcgtaattttatttgtattaatttttgaaccatccatttggacaattatattggctatgtctatcacaggctggttaggcatgagcagagttgtacgtggagaatttttaaaattaaaaaatcaagagtttgtcatggcttcgaaaacattgggggcttcaaaattcaaattgatatttaagcatattttacctaatacattaggtgctatcgtggttacatcaatgtttacagtacctagtgctattttcttcgaagcatttttaagtttcattggtataggtgtacccgcacctcaaacatcgttagggtcattagtaaatgatgggcgagcaatgttattaatttatccacatgaattatttataccagcaatgattttaagtttattaattctattcttttacttatttagtgatggattacgtgatgcatttgatccgaaaatgcgtaaataaaagggggcatagcatatgactgaaagaatattagaagtaaatgatttgcatgtttcctttgatattacagcaggggaagtgcaggcagtgagaggtgtagatttttatttaaacaagggggaaacattggcaattgttggtgaatcaggttcaggtaaatctgtaacaacaaaagcaattacaaaattattccaaggggacacaggaagaattaaaaagggagaaattttatttttaggggaagatttagcaaaaaaacctgaaaatgagttaattaaattacgtggcaaagatatttcaatgatctttcaagatccaatgacatctttaaacccaactatgcaaattggtaaacaagtcatggaaccattaattaagcacaaaaattatagtaaagcacaagctaaaaagcgcgcattggaaatactaaatcttgtaggtttaccaaatgcagaaaaaagatttaaagcatatccacatcaattttcaggtggacaaaggcaaagaattgttattgcaaccgcattagcttgtgaacctaaagtgctcattgctgatgaaccaacgactgcattagacgtaacgatgcaggcacaaattttagatttaatgaaagaactacaacaaaaaatcgatacagcaattatttttataacgcatgatttaggggttgttgcgaatattgctgatagagtggcagttatgtatggtggtcaaatggttgaaacaggagatgttaacgaaatattttatgatccaaagcatccatatacatggggattattatcgtcaatgcctgatttatcaacaacaaatgacacaccattactagcgattcctggagcgccacctgatttattacacccacctaaaggtgatgcatttgcgagacgtagtcaatatgcattagatattgattttaaagtagaaccaccgtggtttaaagtttcaccgacacattttgtgaaatcttggttattagacgcacgtgcaccaaaagttgaactacccgagctggtaaaacaacgtatgaaaccgatgcctaataattatgaaaaaccactcaaggtagaaagggtgtcgttcaatgaaaaatgatgaagtgctattatctattaaaaatttaaagcaatattttaacgcaggaaagaaaaacgaagtgagagcgattgaaaatatttcgtttgatatatacaaaggggaaacattaggcttagtaggagaatcggggtgtggtaaatctacaactggtaaatcaattattaaacttaatgatattacaagtggagaaattttgtatgagggtattgatatacaaaagattcgtaaacgtaaagatttgcttaaatttaataaaaagatacagatgatttttcaagacccatatgcgtctttaaatcctaggttaaaagtaatggatatagtagctgaaggtattgatatccatcatttagcaactgataaacgtgaccgtaaaaaacgtgtctatgatttacttgaaactgttggattaagtaaagaacatgccaatcgttatcctcatgaattttcaggcggacaacgccaacgtattggaattgcccgtgcattagccgttgaaccagaatttattatagcagatgaacctatttcagcattggatgtttcgattcaagctcaagtagtcaatttgttattaaaattacagcgtgaaaaaggtattacattcctatttattgcacatgatttatcaatggtgaagtatatctctgatcgaattgcagtcatgcattttgggaaaattgtagaaatcggaccagcagacgatatttatcaatatccattacatgattatactaagtctttattgtcggcaattcctcaaccggatcctgaatcggaacgtagtcgcaaacgatttagttatattgatgatgaagcaaataatcatttaagacaattacatgaaataagaccacagcattttgtctttagtactgaagaagaagcggaacgactacgaaaaaatttgttggtaacacaagattaaggggaagggggaaatgaaatgacaagaaagttaaaaacgctgattttaatattggttgccacaattgcattaagtggttgtgctaatgatgatggtatttattcagataaaggtcaagtattcagaaaaattttgtcagcagacttaacatcccttgatacatcattaataacggatgaaatatcttctgaagtgactgcgcaaacattcgaaggtttatacacattaggaaaaggtgacaaaccggtgttaggtgttgcgaaagcttttcctgaaaagagtaaagatgggaaaactttaaaggttaaattaagaagcgatgctaaatggagcaatggtgacaaagtgactgcacaagactttgtttatgcttggagaaaaacagttgaccctaaaactggttctgaatttgcatacattatgggggacattaaaaatgcgagtgatattagtactggtaagaaacctgtagagcaattaggtatcaaagcattagatgatgaaacattacaaattgaattagaaaagccggttccatatattaatcaattattagcacttaatacatttgcacctcaaaatgaaaaagttgccaaaaaatatggtaaaaattatggcacagcagctgatagagcggtatacaatggtccatttaaagttgatgattggaaacaagaagataaaacgttactatctaaaaatcagtattattgggataaaaagaatgtaaagttagataaagtgaattataaagttattaaagacttacaagccggtgcttcattgtatgatactgaatcagtagatgacgcaattattactgcggatcaagtgaataaatataaagataataaaggattaaactttgtattaacgactgggacatttttttgaaaatgaatgaaaaacaatatcctgattttaaaaataaagaattaagacttgcaatcgcgcaagcaatagataaaaaaggctacgttgattcagtgaaaaacaatggctcaattccttccgatacattaacagccaaaggcattgcgaaagcgcctaatggcaaagattatgcgagtaccatgaattcgcctttaaaatataatcctaaagaagcaagagcacactgggacaaagctaaaaaagagttaggtaaaaatgaattgacattttcaatgaacacagaagatacaccagatgcaaaaatatctgctgaatatatcaaatcgcaagttgagaaaaatttaccaggagttactttgaaaattaagcaattgccgtttaaacaaaaagtatcactagaactgagtaacaattttgaagcatcacttagtggttggtctgcagattaccctgatcctatggcttacttagaaacaatgaccacaggcagcgcacaaaataatacagactggggtaataaagaatacgatcaattacttaaagtagcgagaaccaaattggcacttcaaccgaacgaacgatatgaaaatttgaaaaaagcagaagaaatgttcctaggagatgcaccggtagcaccaatttatcaaaaaggtgttgcacatttaacaaatcctcaagtaaaaggattaatttaccataaatttggtccaaataactcacttaaacatgtctatattgataaatcgatagataaagaaacaggtaagaagaaaaaataatatgctttgtaaattaggctggagaactttctccagtctttttgtgttggataaaaactttgggaataaaaatttaaaataagtcgttttttaaattactgaaattgattaaatgcataaataactgaatattctaaaaataaacttgtaataattttttctatgagtaaactaaaaagaaaaaattagattgaaagtaggaggcatatgtatggggaagctaattaaatatatttcaatacttcttattgtcgttttagtgttgagtgcttgcggaaaaagcagtaataaagatgaaggagtaaaagatgctactaaaacggaaacctcaaaacataaaggtggtactttaaatgtagcattaacagcaccgccaagtggtgtttattcttcgttattaaatagtacacatgcagattctgtagttgaaggatattttaacgaaagcttattagcaactgataaaaaaatacgtcctaaggcatatattgcttcatggaaggacatcgagccggctaagaaaatagaatttaaaattaaaaaaggtattaaatggcatgatggtaatgaattgaaaattgatgattggatttattcaattgaagtcttagctaacaaggactacgaaggtgcttattatccaagtgtagaaaatatccaaggtgcgaaagattatcatgaaggaaaaactgatcatattagcggattgaagaaaatagatgactacactatgcaggttacatttgataaaaaacaagaaaattacttaacaggatttattactggacctttattaagtaaaaaatatttatcagatgtaccaattaaagatttagcgaaatcagataaaatccgaaaatatcctattggtattggaccgtataaagttaagaaaatcgttccaggtgaggctgttcaactcattaaatttgatgattattggcaaggtaagcctgcactagacaaaatcaatttaaaagttattgatcaagctcaaattattaaggcaatggaaaaaggcgatattgatgttgcgaatgatgctaccggtgcaatggcaaaagatgctaagtcatctaatgctggtctcaaggtattatctgcgccaagcttagactacggtttaataggattcgtatctcatgattacgataaaaaagctaataaaactggtaaagtgagaccaaaatatgaagacaaagaattacgtaaagcaatgctttatgcaattgatagagaaaaatggattaaagcgtttttcaatggttacgctagtgaaatcaatagttttgtaccatctatgcattggatagcagccaatcctaaggacctaaatgattacaaatatgatcctgaaaaagctaaaaaaatcttagataagttaggttataaagatagagatggtgacggatttagagaagatcctaaaggtaataaatttgagattaactttaaacattattcaggttcaaatcctacttttgaaccaagaactgctgcgataaaagatttctgggaaaaagttggcttgaaaacaaatgtgaagttagtagaattcggtaaatataatgaagacttagcaaatgcatctaaagatatggaagtgtacttcagatcatgggcaggaggtacagatccagatccatcagatttataccacactgatagacctcaaaatgaaatgagaacagttttaccaaaatcagatcaatatttagatgatgcattagacttcgaaaaagtaggcattgatgaaaagaaacgtaaagatatttatgttaaatggcaaaaatatatgaatgatgagttacctggattaccaatgttccaaggtaaatcgataactattgttaacgataaagtacgaaacttagacattgaaattggaactgatcaaagtttatataatttaactaaagaagcttagtaatgtaacctcgacgattttgtcgaggtttacttatatggggggatgttatgaataatgtattgttagaggttaaagatttagaaacatcattaaaaataaataatgaatggttagcaactgttgaaaatatttcttttgaattatctaaaggagaagttttgggtatagtaggggaatctggttgcggtaagtccatattaagtaagtcaattattaaattattaccagaaaagatatctaaactaagtaatggagaagttatatttgatggtaaacgaatcgatacgctcaatgagaagcaattgctagatattcgaggaaatgatattgctatgatttttcaagaacctatgactgctttaaatcctgtatttaccataaaaaatcaacttgtggaatctataaaatcacataaaaaaatttctaaaaaagaagcaaataacttagcaaaagatttactaaaaaaagttggaattgctagacaagatgaaatattaaatagctatcctcatcaattatctggtggtatgagacaaagagtaatgattgcaatggccatttcatgttctcctaaattattaattgctgatgaacctacaacagcattggatgtcacgattcaagcgcaaatattagacttattaaaagaattgcaaaaggaaacgcaaatggcaattatgatgattacacatgatttgagtgtagttgctgagttttgcgataaagtcttagttatgtatgcaggtcaaattgtagaatttggaggcataaaagaaatactacacaatccgaaacatccttatacccaaaaattattatcaacaattccaaaacttaaagaagagcagaaacgacttgaaacgatagaaggaattgtgccatcaatccaagcatttcacgttaataagtgcagatttgcaaatagatgtaacaaaaaaatggatatttgtaataatcaatctcctaaaatgcatgtttgtgaagacgtcattgtacgttgtcatttgtacaaaaatgaatataaggagatataagaatggaaaatattttagaagtcaaccaaataaaaaaatactacaaaattaaaactggattattacaaaaaactcagtacgttaaagctgttgatgacgtatcgttttcaataaaaaaaggacaaacttttggattagtaggagaatcgggttgtggtaagtcaacgttaggtaaagtgattatcaggcttgaagatgcaacatcaggctcaataattgttaatggtgaagatataacaagattacaaggtaaaaaactcagaaaatcacgacaacaatatcagatgatatttcaagatccgtatgcatcattgaatccgatgcaaatggttggagatatcatttcagaacctattttaaattataaaaaattgccaaaagaagaaataaaaaaagaagtactatatttattaaaatgtgttggcctaagtgaagatgcatattataaatatgcacatgaattttcaggtggacagagacaaagagtgggaattgcaagagcattggctttgcgtccgagtttaattgttgctgatgagcctgtaagtgcattagatgtatctgttcaatctcaagtactgaatttattaaaagatttacaagaacaatttaacttaagctatttatttatcgcacatgatttaagtgtagtaaaacatataagtgatgtcattggagttatgtatttaggtcatatagttgaaatcgcatctgataaagaaatttatgaaaatcccaaacatccatatacaaaagcgttgatttcatcaataccacaaattgataaacataataacaatagaattatattaaaaggagaattaccttcgccaagtaatccgccgcaaggttgtccttttcatacaagatgtccgattgcaaaagataaatgtaaagaaaatataccacaattaaaggacattggtgatgaacatcaagttgcttgtttttatgtaaataaagtaggtgatttaaatggttaaattaatattaaagagattaggtttaatgattccgttactaattttaatttctattgttgtattttcattagctatcattcaaccaggagatccattttcagatttacaaaacggaaaaataaaacaagaagcgataaatgcacaaagggaaaagttaggcctcaacgactctatatcacatcaatacattagatgggtcaatcatgttatacatggtgatttaggggagtcaatcaaatataaaaggccggtaattgatgttattgaggaaagaattccaaatacaatattactcggtgctatgtcattaattattacttatattatctcatttgctttaggaataacgtcaggtagatattcttacagtttgactgattatactgtgcaaatatttaattatttgatgttagctattccatcttttattgcgggagtatttgcaatttttattttttcttttgaattacaatggtttccgtttcaaggttctgttgatattaaccttaaagaaggtacttttgaatattatatgagtaaaatttatcatacatttttgcctgcattaactttaggattattatctactgctggttatattcaatatttacgtaatgatattattgaaaattctaaaaaagattatgtattgacggcaaggtcaaaaggattatctatgaataaaatttataataaacatatattgagaaattctttaatacctattattacatttttaggtgctgatattgtaagtattttaggtggagctgtgattactgagactatcttttcatataacggtatcggtaaattatttttagaatcggtaataggtcaagactatccattaatgatggcattaacgttgtttttctcatttttaggtttactgggtaatttgatttctgatattacttatggatttatagatccaagaattagaagtaactaggggggattggaatgcaaaataagtcaaaatcgccttttaaaattgcattgtctagatttattcataataaaattgcaatgttatcgattatttttttattaatcataactattatatcaattatagcgccattaatagctcctcttccagtgaaccaacaagatttattaaatataaaaggtgaaatgacagcacaaaacattcttggtacagactctggtggtagggataactttagtcgtttgttatatgcaggtcgtatttcattatccattggaattacatctacaataggaatgcttttgattggaattacagttggagtgatttctggttattttggaggtattgttgatacattattaatgagaataaccgaatttgttatgttatttccatttttaatatttgcaattgtattaaatgctgcacttggagataaaattaaaaatccttatggatctgccataattcttgttctagttattatcgtattaagttggggaggtattgcaagacttgttcgtggtaaagtacttcaagaaaaagaaaatgaatactttttggcagcaaaatcaattggtacacccacatataaaattattttgaaacatcttttgccgaatatattaagtgtagttatcgtacaagcaacattgttatttgccggtatgattgtagtggaatcaggattgagctttttaggattcggaattagtaaagcaataccatcttggggtaatatgttgagtgatgctcaagaaggggatgttataagtggtaaaccgtggatatggatgccacctgctataatgattacattaactatattaagtataaactttgtaggggaagggcttaaagatgcttttaatcctagaggtagacgttaaataataaaagaggcactagttaattctagtacctctttattttatctcttacgtcctaaacccatcgctttttccatttttttgacagttttaaatgaaactttgtgtgctttatctctaccttgatctaaaatatcatcaagtttatctgagttatagaaactttcgtatttttcttggaattctactaaaaatgctttaactatttcagcaaggtcacctttaaatttaccataaccttcgccctcatattttgcctcaatatctttaattggcatgtctgttaatccagcgtatattgaaattaaatttgttatacctggcttgttgtcacgatcaaatttaataataccatctgaatcagttactgcgcttttaatttttttagctgcaacattcggctcgtctaataatgaaatgaagtttttagcattatcatcactcttactcatttttcttgttgggtcttgtaaactcatgacacgtccaccaactttaggcatacgaatttcaggtttcacaagcacatcattatagcgactattaaatctatctacaaggttacgagtcaattcgatatgctgcttttggtcatctccaactggaacgatattagtattgtaaagaacaatatcagctgccattaaaggtggatatgttaatagaccagcaggtataccttcaactgctttctgagctttatctttgtattgcgtcatacgctctaattctccaacagaagcaatcgtagttaacatccatcctgcttgtacgtgtgcagggacttcagattgtatgaacaatgttgctttgtctggatctataccagaagctaaataaatcgctgctaattgtctggtctgtttacgtaattttaaacgatcttgtggcattgtaattgcatgttgatctacgatacagaaataacaatcatagtcattttgcacatcaacaaattgttttagtgcgccaatataatttccaatagtaggaattccactaggttggatgcctgaaaataatgtctccatttaaatgcctactttcttagtaatattttaataattatcattataacagtatttcttaaaaatgtaagatgtgttagaatatacgtataacttactactaacaaagggattaataatcttttttataagtgtagaaacttatctgaaaaattaggtttttctcatttaattttaatgttagatagttataataaatagtaacgattaagaattttagaaaaaaatgttttttcttgatctataactaaattttaagcaatgaattttattcattcaaataggagagtgagatgtatggtaacattatttacttcaccaagttgcacatcttgccgtaaagcgaaagcatggttacaagaacatgacattccgtatacggagcgtaatattttttctgaacatttaacaattgatgaaattaagcaaatattaaaaatgactgaagacggtactgatgaaatcatttctacacgttctaaaacataccaaaaattaaatgttgatattgattcactaccattacaagacttatattcaatcattcaagataatcctggcttattacgtcgtccaattattttagataataaacgactacaagttggttataatgaggacgagattcgacgtttcttacctagaaaagttcgtacgttccaattacaagaagcacaacgtatggttgactaataaccatttaactatgtgtcatactttactaaaagatatgtcaagcaacactatttctatagtgttgcttttttggttttaattttacaataattgcttagtatcttttaaatcaaatgtgcaattgttaatatagctctatattagagtgttttggatgaaacatttgctatgataaggtaaaattaaattaagaaagtgctttaatgctttaactgtataaatcatttaaatagttttgctacaacgaatatgttattataagttaccaaaatattttagagaaagaaatcaaacaaataaattgtattttgtttgatgctttaatacaatgtggatactattcatcgactgtaaggagtgagatgatatgagaatagaacgagtagatgatacaactgtaaaattgtttataacatatagcgatatcgaggcccgtggatttagtcgtgaagatttatggacaaatcgcaaacgtggcgaagaattcttttggtcaatgatggatgaaattaacgaagaagaagattttgttgtagaaggtccattatggattcaagtacatgcctttgaaaaaggtgtcgaagtcacaatttctaaatctaaaaatgaagatatgatgaatatgtctgatgatgatgcaactgatcaatttgatgaacaagttcaagaattgttagctcaaacattagaaggtgaagatcaattagaagaattattcgagcaacgaacaaaagaaaaagaagctcaaggttctaaacgtcaaaagtcttcagcacgtaaaaatacaagaacaatcattgtgaaatttaacgatttagaagatgttattaattatgcatatcatagcaatccaataactacagagtttgaagatttgttatatatggttgatggtacttattattatgctgtatattttgatagtcatgttgatcaagaagtcattaatgatagttacagtcaattgcttgaatttgcttatccaacagacagaacagaagtttatttaaatgactatgctaaaataattatgagtcataacgtaacagctcaagttcgacgttattttccagagacaactgaataacgatattaattaagcaacgcactatgaaaggagactctttggagtctctttttttattgatttcaaaagctgaaaaagtaatagtagttaaacttacgtgtaatattttgaggtgaagatatgttagtagctttaaatgaagaaaaggaacgtgtgttagcaactactgcattgagaaagacacaatatttttgtccggtgtgtggcaagcaagttattttaaagcgtgggctcaaagtaattagtcattttgcacataaacatttagcggaacaaaaatgttttaataatgaaacgattaaacattataaaagtaaattgattttagcacagatgatacagcaacaaggatgtaaagtagagatagagccatttttaaaagaaataaaacaaattccggatattttgattaataataaatatgttattgagctacagtattcgccaattccttataaacagattcttcaacgaacggaaggtttaaagaaaatgggatataaagtaagttggttattaaatgatgttgattattgtcataataaagtgaagttcaatcattttcaaagtatgtttattaatccaatcactcgaaaacttcatacgttcaatttagagaaaaaacaaataatgatgtttcaacaaatacaatatttaggcgggcacaaatatgtcgctgaaaaaaggaatgccaaaattagtgagttgtttaatgaggcgccttgtgattatcatgctgtttataaattatcaaagttcgcaattaatcaatatatcaaatattgtcgctggcaaaattctgttttagaacccactttaagtgcaatatatcaattacagttaactgatcaagaagtagtgcacaattatggttatatttttccagagcaaatttatattgaaaatcatccaattgagtggcaattacaagttgatttatggttaaagaatggaaaaagcaaattagtaagtgacaatcttaattattttaaactgaaaaagtttattgttggtctagaaagtaaaacagcaattatagaaaaacttattaacaattatttaaatatttgttcagatagaggtaatgacgtgcaaattttgttctaaaatgagaaaattatatcaattatattttattaggaggtttactacatatgagtcaacaattatctagagaagaacaggaacgtaaatatcctgaatatacatgggacttaacaacaattttcaaagatgatgaagcttttgaggctgcatttaaagaagttgaaaatgagttaggcaaagaagaacaatttaaaggacacattggtgatagtgctgagacattatacaatgcattagaattagaagatacattaggtactaaattagaaaaagtatatgtatacgcgcacctaaaacaagaccaagatacaacgaacgacaagtatactggtatggagtcaagagcacatcaattaattattaaatttagctcggcatggagtttcttagtgccagagattttacaaattgatgaagataaaattcaatcatttgtaaattcatatgataaattacaaaaattcgcatttgatttgaagttgattaatgaaaaacgtcctcatattttagatgctgaaactgaaaagttattaacagaagcgcaggacgcgttatcaacgccatcaaatgtatacggtatgtttagcaacgctgatttagtatttgaagatgcgatagataaagatggaaatgcacacccgttaacacaaggtacatttattaagtatttagaaacagatgatcgcaaactaagagaaagtgcttttagaaatgtatataaagcatatggtgctcataataatacgcttggcgctacgctagcaggtgaagtgaagaaaaatgtatttaatgctcgtacacacaattacaaaactgcaagagaaaaagcattgagtaataatcatattccagaaaatgtatatgacaatctagtaaaaactgtacataaatatttaccattgctacatagatatactgaattgcgcaaagaattgctaggtttagatgacttgaaaatgtatgatttatatacaccattaattaaagatattaagtttgaaatgccttatgaagaagctaaagagtggatgttaaaagctttagaaccaatgggtgaagaatatttaaatgtagttaaagaaggcttaaacaatcgttgggtcgatgtctatgagaataaaggtaaacgttcaggtggctattcatcaggtgcacatttaactaatccatttattctacttaactggtctaatactatttcagacttatacacattagttcatgaatttgggcattcagcacatagttacttcagtagaaaattccaaccgtcaaattctagtgactacactatttttgtcgctgaagttgcatcaacttgtaacgaagcacttttaagtgattatatggataaacatcttgatgatgaaaaacgcttattattattaaaccaagaattagaacgtttcagagctacattattccgacaaacaatgttcgcagaatttgagcataaaattcatgcaattgaagaagcaggtgaaccattaacgccaactagaatgaatgaagaatatgccaaattaaataaattatacttcggtgattctgtagaaactgatgaagatattagtaaggaatggtcacgtattccacacttctatatgaattattatgtatatcaatacgcaactggttacagtgcagctcaaagcttaagtcatcaaattttaacagaaggtaagccagcagtagatagatatattaatgaattcttgaaaaaaggtagctcaaattatccaattgagatattaaaaaatgctggtgtagatatgacaacacctgaaccaattgaacaagcttgtgaagtttttgaacaaaaattgaacgcttttgaaaaattaatgaaagcttagtactattgtattcgcttacattatgaacagattgtgacaatttaaattaagtactattaaaaggttgaaatggtagagatagcatgttatattatgaacatgaaattaatcacataacaaacatacccctttgtttgaagtgaaaaatttctcccatcccctttgtttagcgtcgtgtattcagacacgacgtttttttatgttcttttttaataagagggaagtgaagttgtataaaaatgtattaaatatgcactttttatacattaacgattaatataagtctattttgtaccaaatttataatttgtataattttcgaactggttaaattcggaaaatatcactaatatatttagatcgatgtgtaacattacgttctaataatttaatgttgcaaaattaagagtcagtaaaaagacctcgttacatttatggtgtacgaggtctttaatttatttattttgatttgattttaggcattttagatttccagaaatcgccatctggatatttaagtttttcaattttttgttgaatggctaacttctttaactctttgtttaaaagtttttctggccattcataaatagtaagtaattcttccatcgttacaagttgttgttgctgtatataagtttctaatttaggaggaagattcttttcgataggtttacccatcaattcattaattatataagtatagatgtgatatgggtataatccttcgacttttaaaccttcttcatgaacatcttcactaaagaaaacgagagaaggggcttgttcgatttccatttctcttgcaatatgcaaatcaattttcaagctttcggttagtttacttttttgtaagtcgtctttaaatacttctaaatcaatacctgcattttgaatacagtcacaaatcattgattctgtaataatatctcttttaggtatgatttcattttgcattaaatgtataaatcgttcggcacgtacacgaccttgtaactcagctgctttataagctagggcgatgttatcaaagttggatgtactttgagcttggcatttcgttaatacttttaacgaaggatttaatatatgtctgatacgtatatattgattatattcaattcttaatttggataagattgctgataatttgaagcaatcggagctaaatggatcgaaaaatgaataaatttcgattttacttacaggtgatagattaatatcttcacgactcttattttccattattcgtaattctccagccatgtttattcacctacaattaattttaggaattcaccatatgattagcagttaatcttaagcgctcaaataaataatctccaacaccttgtggaaacgcagcgcgattaattgctgtctgcatattttctaaccatgcatctctttcaaattcagtgattgtaaaatccatatgtctttttcttagcataggatgtccgtgttcttcggtataaatgtttggaccgcccaaaaactgtgttaaaaattgtttttgtttacgacttgtttctgcaaaatctcctggaaacaggtgattaagtcgttcatctttttctacaagggtgtaaaaataatcaatcatatcgtataacgcttctttaccaatgatgtcatatggtgttgttgtcatttaatcacccattttcaaaaatttactattacgaacttaagttaatatataactaatataacatgattttaaacatttgaaagaaatatgcatatttgccaatttaatttatattgtttgaaagtgtttcttttttcttgaaaaaacgttgaactttatttaaaggttgatgatgttcgaggtttagttcgtttaataaagattggaacttttgtaaaccttgattatagtctttaacttcgaactctaactcataatccgcagtatcgaaatactcacttttatctaaaacgagtaaatcacctttatatttagtttcttggcgatatgtcgttaatgcaccaagtattgataaagttgtatcttttacaccaaactgttcaactataatttgacgaatgtcatctggaagattgtcgtttgaaataatcaagttcatctctggtttaatgtcgacgatatagttgtattctaatagaccaacctttgctggtgtctttaaagtcatttcatattgattgtctttaactcttatgcgtagtgcagagcgatgttcctttaatttgaaatcgggtgtatcaatatagtaattgacttgcttaaaaagcacactgtctttaaaatatttctcttgcaatttattatagattgatgcagttatcatttgtttaaattctatttcatgatttgttgccatgatatgtatacacctcgtatcaaattcaatttatcttaactatattatgaatgacaaagttgaattttaaaagtaatttcctttatctattatcaatgttaatttgaccattaaaaatagtgttcgtaagtgttttgtattattgaattgtgttaaaatgttatggaataagaggaggattaagcatgcgtttatatattaatgaaattaaaattaaagatgacatactttattgttatacagaagattctattaaaggattatctgaagtaggacaaatgctcgttgatagtgataattatgcctttgcgtatacattagatgatggtaaagcgtatgcttatctcattttcgtacaagaaacatggacgatgttgcatgaaaacatgactaaaaaaattattatcaatgatgaactagaattgactgaattccaccaagaacttacttatattttagacaacataaaagggaataataattatggtaaggaatttgttgcaaccgttgaagaaacattcgacattgaataaagcggggtgaagcactatgaatcaatgggatcagttcttaacaccttataagcaagcggttgatgagttgaaagtgaaacttaaaggcatgcgcaaacaatatgaagttggtgaacaagcgtcgccaatagaatttgttactggtcgtgttaaaccaatcgctagtattatagataaggcaaacaaacgacaaataccatttgataggttaagagaagaaatgtacgatatcgctggtttaagaatgatgtgccaatttgttgaagatattgatgttgtcgtcaatattttaagacaaagaaaagattttaaagtaattgaagaacgagattatattcgtaacactaaagaaagtggttaccgctcgtatcatgtcattattgaatatccaattgaaacattacaaggccaaaaatttatattggctgagattcagattcgtacattagcaatgaatttctgggcaacgattgaacatactttacgatataaatatgatggtgcttatccggatgaaattcaacatcgtttggaaagagcggcagaagcagcgtatttacttgatgaagagatgtctgaaattaaagatgaaattcaggaagctcaaaaatattacacgcaaaaacgttctaaaaaacatgaaaatgattaacgaggtgttataaatcatgcgttatacaattttaactaaaggtgactccaagtctaatgccttaaagcataaaatgatgaactatatgaaagattttcgcatgattgaggatagtgaaaatcctgaaattgttatttcagttggtggtgacggtacattactacaagcattccatcagtatagccacatgttatcaaaagtggcatttgttggagttcatacaggtcatttaggattttatgcggattggttacctcatgaagttgaaaaattaatcatcgaaattaataattcagagtttcaggtcattgaatatccattgcttgaaattattatgagatacaacgacaacggctatgaaacaaggtatttagcattaaatgaagcaacgatgaaaactgaaaatggctcaacacttgttgtggatgttaacttaagagggaaacactttgagcgatttagaggcgatggattatgtgtatcaacaccttcgggttcaacggcttataacaaagcgctaggtggcgcactgatacatccttcacttgaagcaatgcaaattacagaaattgcctcgataaataatcgtgtgtttagaacggtaggatcaccacttgtattaccaaagcatcatacatgtttaatatcaccagttaatcatgataccattagaatgacgatagatcatgttagtatcaaacataaaaatgttaattcaatacaataccgtgtagcaaatgaaaaagtgaggtttgcacgttttagaccattcccattctggaaacgtgtgcacgattctttcatatcaagtgatgaagaacgatgaaatttaagtatcatatatcacaacaagaaactgttaaaacttttttagcacgacatgatttttctaagaagacagtgagcgccattaaaaataatggcgctttaattgttaatgatgaaccagtcacagtgcgtaagcaattaatgacaaatgatatattagaaattcatttaccgcgagaaataccgagtgttaatttaataccttatgctcgtaagctagaagtattgtatgaagatgcttttatcatcatagttactaaaccaaacaatcaaaattgtacgccttcgagagaacatcctcatgaaagtttaatcgaacaagtactatatcattgtcaggaacatggtgaaaatattaacccacatattgttacgcgtctagatcgtaatacaactggtattgtgatattcgctaaatatggacatatccatcatttattttctaaagtaaacttgaaaaaaatatatacttgccttgtatatggtaaaacccatacatctggtattattgaagctaatattagacggtcaaaggatagtattataactagagaagttgccttggatggtaaatacgctaaaacatcttatgaagtaataaatcagaatgataaatacagtttatgcaaagttcatttgcatacgggacgtacacatcaaattcgtgtacattttcaacatattgggcatccaattgtgggagattctttgtatgatggttttcatgacaaaattcatggtcaagtactgcaatgtacgcaaatatattttgttcatccaatcaataagaacaatatttatattacaattgattataagcaattacttaaattattcaatcaactctaattcacacagggggtgtaagtatgtcaatgaacacagatgaaaaagagcgtgttcaagaggaattatacgaccaaactttattagatcaatatttagaaaatgatgatattgatcaatttagagatgaatttctagcattacacacatatgaacaaagtgagtattttgaagatactaccgatgaaaatagacaaaagatttttcaatatttatcacctgaagaagttgcaaatttctttgatcaattagatattgatgacgatgaatatgagttgctatttgataagatgaatgcgacatacgcaagtcacatattagaagaaatgtcatacgacaatgcagtagatattttaaatgagttgactaaaccaaaagttgctagtcttttaacattgatgaataaagatgacgcgaatgaaatcaaagcattacttcactatgatgaggatacggccggcggtattatgacgacggagtatttatcacttaaagcgcatacgcctgttaaagaagcattattattggtcaaagcgcaagcaccagacgcagaaacaatatatgttatatttgtcgttgatgatgatggtaaattagtaggtgttttatcgctaagagatttaattgtagctgaaaatgatgcttatattgaagatattatgaatgaacgtgtcattagtgtgaatgtagcagacgaccaagaagatgttgctcaagttatgagagactatgatttcatggctgtacctgttatagattaccaagaacatttgcttggtatcatcacgattgatgatattttagacgttatggatgaagaggctagtgaagactactctcgtttagccggggtatcagatatcgattcgactaatgattcaatcattaaaacagcattaaaacgtttaccatggttgattattttaacatttttaggaatgattactgcgacaattttagggagattcgaaaaaacattagaaaatgtagcgctactcgcagcgtttattcctattattagtggtatgtcaggaaattcaggtacacaatctttagccgtttcagttcgtaacattacgacaggggaaattaatgagcaaagtaaatttagaattgcattaagagaagcaggaagtggtgtattatcgggtgttgtatgttcaacaatattatttacaattattgttgcaatatatcatcagccacttttagcattaatcgttgcaggaagtttaacttgtgcgatgacggtggggacgtttgtaggttcgatgattccattattgatgaataaattaaatatcgatccagcagtggctagtggaccatttattacaacaattaatgatattattagtatgttgatttattttggtttagctacatcatttatggcttacttaatttaaggaggagttatggagtttttatctttagttattgttgttttagcagcgtttttaactccaataattgtcaatcgattaaatattaatttcttgccagttgttgttgcagaaattttgatggggattgtgattggaaattcatttctaaatatagtagaaagggattcaattctaaatattttatcaacgttaggctttatctttttaatgtttttaagtggtttagaaattgattttaaagcttttaaaaaagataaacgcgcacgtcaaggacaaaatgatgatgaatcctcaattccagggcatcttaatctagcgttaactgtatttgcatttattatgattatttcgattcttttagcgtatgtatttaaatggcttggattagtggatgatgtgttattaatggtcattatcatttcaactatttccttaggcgtagttgttccaactttaaaagaaatgaatattatgagaacaactatagggcaatttatcctattagtagcagtacttgcggacttagtaactatgattttattaacggtctatggcgcaatcaatggtcaaggcggcagtacaatatggttaataggtatattagttgttttcacagcaatttcatatattttaggtgttcaatttaaaagaatgtcatttttacaaaaattgatggatggtacgacgcaaatcggtattcgtgcggtatttgcattaataatattattagtagccctagcagagggagttggcgcagaaaatatattaggtgcattcttagcaggtgtcgttgtttcattattaaatccagatgaagaaatggttgaaaagttagactcatttggttatgggttctttattcctattttctttataatggttggtgtagatttaaacataccttcattaattaaagaaccgaaattactaattatcataccgattttaatcgttgcatttatcatttcaaaattaattccagtcatgtttattcgacgttggtttgatatgaaaacaacgattgcatcagcatttttattaacatcaacattatcgctcgtgatagctgcagccaaaatttcagaaagattaaatgctatttcagctgaaacgtcaggtatattaattttaagcgcagtcattacatgtgtattcgttccgattattttcaaaaaactgtttccagttccagatgagtttaaccgtaaaattgaagttagtttaattggtaaaaatcaattaacgattcctatagcgcaaaatttaacatctcagttatatgacgtgacattatattatcgcaaagacttgagtgatcgtcgtcaattgtcagatgatatcacgatgatagaaattgctgattatgaacaagatgttttagaacgactaggtctgtttgaccgagacatagttgtttgtgctacgaatgacgatgatattaaccgaaaagttgctaaattagccaaagcacatcaagttgagcgtgtcatttgcagacttgaaagcacaacggacgatacagagttagttgattcaggtattgaaattttcagtagctacttaagtaataaaatcttattaaaaggtttaattgaaacacctaacatgttgaatttattaagtaatgttgaaacgtcactatatgaaattcaaatgttaaattataaatatgaaaatattcaattacgtaatttcccattcggaggagacatcatcttcgtgcgtattatccgtaataatgagtcgattgttccgcatggagatacacaattgcgatatggagatcgcttaattgttaccggtgctaaagaatacgttgatgaattgaagcaagagttagaattttatttttaacaataatgatattaaaatgcagacgtattttagtacgacgtaaaattaatgattttaaaatgctagtatgtatatgattttgataaataaatgctttttacgtaaatcaagtttgatacagaaaggactaaatcaaacatttatcgttgtaatacgtttaaataactttattaaaaagtcataatagtgttaaaatgtattgacgaataaaaagttagttaaaactgggattagatattctatccgttaaattaattattataaggagttatcttacatgttaaatcttgaaaacaaaacatatgtcatcatgggaatcgctaataagcgtagtattgcttttggtgtcgctaaagttttagatcaattaggtgctaaattagtatttacttaccgtaaagaacgtagccgtaaagagcttgaaaaattattagaacaattaaatcaaccagaagcgcacttatatcaaattgatgttcaaagcgatgaagaggttattaatggttttgagcaaattggtaaagatgttggcaatattgatggtgtatatcattcaatcgcatttgctaatatggaagacttacgcggacgcttttctgaaacttcacgtgaaggtttcttgttagctcaagacattagttcttactcactaactatcgttgctcatgaagctaaaaaattaatgccagaaggtggtagcattgttgcaacaacatatttaggtggcgaattcgcagttcaaaactataatgtgatgggtgttgctaaagcgagcttagaagcaaatgttaaatatttagcattagacttaggtccagataatattcgcgttaatgcaatttcagctggtccaatccgtacattaagtgcaaaaggtgtgggtggtttcaatacaattcttaaagaaatcgaagagcgtgcacctttaaaacgtaatgttgatcaagtagaagtaggtaaaactgcggcttacttattaagtgatttatcaagtggcgttacaggtgaaaatattcatgtagatagcggattccacgcaattaaataatatcattcaacagctttgttcacgttattatatatgtgagcaaagcttttttgcttttataataatcggactgatggaaaattatttgatatttcatttgactgattttttatgcacaaaaaaatcgcctcaaaagctgtagtttcaacttttgatgcgatagtatcttatattcttaaaagacatccacagaattagtccttaacattactgtttgctttatcaataatgcgttggcggtatttgaaaatattactaacaaccgttttaagtacagcatataatggcactgcaatcagaactaatgtaaagccacctaaatctcctgctgctaaaataacaacgataattgttaaaggatggatacttaaagatttacccattacatttggtgtaatgatattaccttcaagttgatgtgcaattaatgtaatgatacaaacccatataaatgtagtaggactatctataataccgagtattgctgcaggtgcaaatgataaccatgaacctaagaaaggaattaagtttgcgacaccagcaaatagtactaataaaggaatatatggtaagtcaataattgaataaccgatatataagaatatacctaaaataacactgacagttacttgaccttgaatgtaagattttaatgtaaagtttaaatcagttaataaatctacgaaaaatactttacgttcacctttgaaaaatttagcaacagctgggataaatttttcatggtcttttaacatataaattaagaagaatggaaccataatcaataagaagatggttgaaattaatgatgtaatgtactgtaatgaattagataaaatattagtaacgccatcacccattgatttaaccatatttgtaattctacttgttacatcttcaggtaatttatccatttgagctagtgcgaatttaataatttgctctgcttctttttgtagggcaggtgtctgactaattaaattgttgatatttgaaatgatgattggtgcaacaaacgcaacaattaagccgataatagcaaacaaagctaacatgattgttgttatactagcccatcttggaaaaccgactttttcaagtaagttttgaaaaggtagacagatataaaataaaaaaccactaattaaaaatggaagaaatacagaaccgatgattgtagctattggagtaaatacttcgtgcacttccataaatagtttgatgagaatgaacagcataataagagcgatgccagttcggaaccaaaccttgtttaacataaacgatgttcctcctatttttctaaacttagttattatttagtatatcctaaatagcagtgcttaaaaaggttaatattttttaaatatacttaaattaaccattcactttctattttaagatatttactttcaatagtttgtgagacttttcaatgactcgtaagtctgcaattggatcaaacagcaccagtttatatgaataacttattttaatattaaacgtgtttaaataatgaaatgatcatattaatatttataagaatattctgaaaaatatattgaagtgtctcgtgcttaatcgtataatatttttatgtttaaacaatagggggaatcttatgattgaaaaattagtaacctttttaaatgaggttgtttggagtaagccattagtttatggtttgctaattactggtgtgctatttacattgcgtatgcgattttttcaagttagacattttaaagaaatgattcgattaatgtttcaaggagagaagtctcctaatggtatttcaagttttcaagcgatagccatgtctttagcaggcagggttggtacaggtaatattgtcggtgtatctactgcaatatttataggaggacctggtgcagtattttggatgtggattactgcgtttttaggtgcaagtagtgcttttattgaatctacacttggtcaaatattcaagagagttgaaaataatgaataccgtggtggaccagcgtattatattgaatatggtattggtggtaaatttggtaaaatttacggaattatctttgctattgttacgattatctcagtaggtctattgcttcctggtgtgcaatctaacgctatagcaagttctatgcataatgcgattcatgttccacaatggttaatgggtgctattgttgtagttattttgggattaattatttttggtggtgtacgtagtattgccaatgttgcaacagccgttgtaccatttatggcaattatttacatactgatggctgtcattatcatttgtatcaatatacaagaagtgccagcgttatttgcattaattttcaaatcagcatttggattacaatctgcttttggtggtatcgttggcgcaatgatagagattggtgttaaacgtggattatactcaaatgaggctggtcaaggtacaggtccacacgcagcagcggcagcagaagtatcacatccaagtaaacaaggtctagtacaagcattttcagtttatattgatacattatttgtatgtactgcaactgctctgattatacttatttctggtacatataatgtgactgatggtacggttaatgcgaatggcacaccgcatttaattaaagatggcggtatttatgttgaaaatgcaacaggtaaagattattcaggtactgcgatgtatgcacaagccggcattgataaagcgttccatggcagtggttatcaatttgatcctactttctctggcgtaggttcatactttattgcatttgctttattcttctttgcatttactactattttgtcgtactactacattacagaaacaaatgttgcttatttaacgcgtaatcaaaataatcaagtttcatcgatatttattaatattgctcgtgtgattattttgttcgctacattttacggtgcagttaaaacagctgatgtagcatgggcattcggtgatttaggtgtaggtctaatggcttggttaaatatcattgcgatttggattttacataagcctgccgtaaatgctttaaaagattatgaaattcaaaagaaacgtttaggcaacggttataatgcagtttatcaacctgatccgaataaattacctaatgctgtcttttggttgaagacgtatccagaacgtttaaaacaagcacgtaccaaaaagtaatctacttttgtttatagtatatgtagtgatcatttgataaaaaaagaaacagcattgataattttaggtgctcagaaatttgaattttaaaatatagtgtctcttggtacaataataatacaattactagggggcacttttttatgttggaatttaaagctggaaagattaataaacttgttttatatagtgatattttaaatagagatgtcacactaagtatttatttaccagaatcttataatcaacttgttaaatataatgtcattctttgctttgacggattagattttttgcgtttcgggagaatacaacgtacatatgaatcgttaatcaaagaagcgcgtattgatgatgcgatcattgtcggattccattatgaagacgttgataagcgtagggaggaatttcatccacaaggaagtcgttctcatttaactattcaatcagtcggtaaagaaatattgccatttattgactcgacgttttctacactgaaagtaggtaatgcaaggttattagtaggggatagtttagcgggtagtattgccttattaacggcgttgacctatccaacgatttttagtcgtgtagcaatgttaagtccacattcagatgacaaagtattagataagctaaatcaatgtgcaaataaagaacaattgacaatttggcatgtcattggtctagatgaaaaagattttactttaccaacaaatggtaagcgtgccgatttcttaacaccgaatagagaattagctgaacaaattaagaaatataatataacttattattacgatgaatttgatggtggtcaccaatggaaagattggaaaccattgctgtcagatatattattgtattttttaagtaaaaacacagatgatcaactttatgaataatttacattagtagatttagtatgaattgtcttcatatagtctggtctataatataatttataaaagattttactgtttaatttaatttaaatttgacgaaattgcaaaagatgtataatgaattatttttaatgtaacggttttcaaagaaatttgatataatagcaataggttaaacaaaggaggaattcagatgattttaggattagcattaattccatcaaagtcatttcaagaagcggtggattcttaccgtaaaagatatgataaacagtattcacgaattaaaccacatgtgacaattaaagcgccatttgaaattaaagatggtgatttagattctgtcattgaacaggttagagctcgtattaatggtataccagcagtagaagttcatgctacaaaagcttctagcttcaaaccaacgaacaatgtgatttactttaaagttgcgaagacggacgacttagaagaattgtttaatcgctttaatggagaagatttctatggagaagctgaacatgtttttgtgccacactttacaatagcacaaggactatctagccaagaattcgaagatatttttggtcaagtagcattagctggggtagaccataaagaaattatcgatgaattaactttgttacgttttgacgatgacgaagataaatggaaagttattgaaacgtttaaattagcttaagtaacataatagtattgttaatcgtagtatgtttgaattaataagaaaatggtcatttttattgaatgtaataaaaatgaccattttctttattttaaaatacgttttaaccttacttagctttttctctatttactataaagtagcttccataaaatacagctaagactaaaaagattaatgccgagaaataaaatgtattgtttaaattgttggtaaattgtgtaattaatccgccaaataatggccctatcattgagccgaatccttggatactattaaaaacaccccaagtttcttcttgttcatctgatttgataaatcgtgccataaaggtattccatgctggtaataagatgccatacattagaccgatagctaaagcgataatccacaagatgtgaatattaacaatcatagatagagtaaaaattaatatcatgtataaaataaatccgcttagaataacaccatacataaagtttctgctgcggttatctattagtttcgataaaaatagcatcgaaactgcacagccgataccaccaataatgattgcaacagtatattcaattgtgcttacgttaataaccttagtagcatatgttggtaatataggaactagggcagcaattgcggcaccttgtaaaagaataccagggaacaacaataaatggcgctttgtcacatcaacaatttgtctcaattgagctttaactggacgagtattataatttgttaactttacatcgacaaaataatataatatccatgcaattaaaacgactaaagacatcatgaaggcaaagcgtgttgggtgcactttgataagtagattcataaaaaccatacctaccaataggcctaacaaccatgaaaaataaacatagcccatttgtttgccacgtttatcttcttcaacactggataacataatgacccaaataggactaactgcaataccgagcatcatagcactaaatatgattacaaaaggtgatgctggaaaccaaataactaaaaataaacttgtaaatgctaaaataaatccagtcgttaaaacgatttttgtgccgaattttttcagtaaaaatcctataacaaagtttgtagatgcatcagcaataaaatgtattgaaaatgctagagacgttattgctacagcaatggttgtaactgttggcaagaaattaatatagcttaggatatacatgcctctcgcaaattccattaaaaataagataataagcattaaaatgaaatttttatgattagcgtaattatttaacgaagaatcttgcatataaaggaacctttccataaatctcttgtggttgtgatgaatgaccgattaaatcaagtaagtctcgacatattgtctgtgtagcatacttaattttatcttgttccattgtactaatcatgttagttaattgctcattaccgttagttaaacttgctacaatttttattgcttcttctggagtatcagcgattttaccaaaacctttttcttcaaagtaaagggcattttcaagctcttgaccaggtgcaggatttaggaaaatcattggaatacaacgggcgaaaccttcagttattgtgataccaccaggtttcgtaatcataagttgacttgatgccatccattcattcatgtgtttggtataacctagaatcaatacattctcgttagatttaaacttagctgttaaagaacgctttagctctttgctcttaccacaaatcataactacttgtgcatttgcacttttcgctaatatatcagtaatcatcgtgtcaaaacctttagatacaccaaatgcaccagctgacattaaaatagtttgcttatctggatctaagttgttgtctattaaccactgcttttgattaataggcgtttcaaatttgttatcaataggaatacctgtcactttaactgttgaaggatcaatacctacgtctatgaagtcttgtttcgtttcttttgttgccacataatatcttgttgaatacggcgtaatccagtttttatgtaagcgatagtctgtcatcactgtagcaactggaatattaatgttaaattgctcagttagtaccgacataactggtgtaggaaacgttaataatattaaatctggcttttcttttatcaataaattaattaacttattaagtccatagtatttgtaaaaacatttgtctagtttatctgggcggctgtaataaaaccctttgtacatatttctaaaatatttaaagctattgatataccattttttacaaatagaagtcaaaattggatgagcttccataaataaatcgtgctcaatgacgcttaaatggtctagattcatatcattaagttgattaacgatactctgtgtaacttgcatatgaccgttaccgaatgagccagtaataatcaatatctttttattttgagtaaccattaatagccaccctccgttagtttgaaaattttatttaagtgtaacttattttacggcattataaaagaaataaagacgcaaagtcgttacatttatagcaattttaatcaatagatgaattgatacaaaataaaacgttattttataaagcaatttattgttctatgttttatttgtatatttaaaattatccagtatacaattatagcatatttttggaaacaattatgatattataccatgttacaagatggttttaataatttaagatgagccataattgtaaaactaattcataataccgtatgttttatttttaatagtagaaattagaaaatgctgattagtaggatataacagtgaaattataaatttattaacatcaacaaaacgtgtataataaacatattgtagaaaaaggagcggttcagtttggatgcaagtacgttgtttaagaaagtaaaagtaaagcgtgtattgggttctttagaacaacaaatagatgatatcactactgattcacgtacagcgagagaaggtagcatttttgtcgcttcagttggatatactgtagacagtcataagttctgtcaaaatgtagctgatcaagggtgtaagttggtagtggtcaataaagaacaatcattaccagctaacgtaacacaagtggttgtgccggacacattaagagtagctagtattctagcacacacattatatgattatccgagtcatcagttagtgacatttggtgtaacgggtacaaatggtaaaacttctattgcgacgatgattcatttaattcaaagaaagttacaaaaaaatagtgcatatttaggaactaatggtttccaaattaatgaaacaaagacaaaaggtgcaaatacgacaccagaaacagtttctttaactaagaaaattaaagaagcagttgatgcaggcgctgaatctatgacattagaagtatcaagccatggcttagtattaggacgactgcgaggcgttgaatttgacgttgcaatattttcaaatttaacacaagaccatttagattttcatggcacaatggaagcatacggacacgcgaagtctttattgtttagtcaattaggtgaagatttgtcgaaagaaaagtatgtcgtgttaaacaatgacgattcattttctgagtatttaagaacagtgacgccttatgaagtatttagttatggaattgatgaggaagcccaatttatggctaaaaatattcaagaatctttacaaggtgtcagctttgattttgtaacgccttttggaacttacccagtaaaatcgccttatgttggtaagtttaatatttctaatattatggcggcaatgattgcggtgtggagtaaaggtacatctttagaaacgattattaaagctgttgaaaatttagaacctgttgaagggcgattagaagttttagatccttcgttacctattgatttaattatcgattatgcacatacagctgatggtatgaacaaattaatcgatgcagtacagccttttgtaaagcaaaagttgatatttttagttggtatggcaggcgaacgtgatttaactaaaacgcctgaaatggggcgagttgcctgtcgtgcagattatgtcattttcacaccggataatccggcaaatgatgacccgaaaatgttaacggcagaattagccaaaggtgcaacacatcaaaactatattgaatttgatgatcgtgcagaagggataaaacatgcaattgacatagctgagcctggggatactgtcgttttagcatcaaaaggaagagaaccatatcaaatcatgccagggcatattaaggtgccacatcgagatgatttaattggccttgaagcagcttacaaaaagttcggtggtggccctgttgatcaataaaagatttattgatgaaggtaaaactattgatgtttatttattcgaagcattaaataaccagataatcattgctataccagattggttttggtcatatcagatggcaatgacattagatgaagaaacttgttttgaagcaatactcatgcaattgtttgtttttaaagaagaggaagaggcagaatcgattgcatcacaactaacagattggatagaaacatataaaaaggagaaagactaatgaacttaaagcaagaagttgagtctagaaagacttttgcgattatttcacatcccgatgcagggaaaacaacgttaactgaaaaactattgtacttcagtggtgctattcgtgaagcgggtacagttaaagggaagaagactggtaaatttgcgacaagtgactggatgaaagttgaacaagagcgtggtatttctgtaactagttcagtaatgcaatttgattacgatgattataaaatcaatatcttagatacaccaggacatgaagacttttcagaagatacgtatagaacattaatggcagttgacagtgctgtcatggtcatagactgtgcaaaaggtattgaaccacaaacattgaagttatttaaagtttgtaaaatgcgtggtattccaatctttacattcattaataaattagaccgagtaggtaaagaaccatttgaattattagatgaaatcgaagagacattaaatattgaaacataccctatgaattggccaattggtatgggacaaagtttctttggcatcattgatagaaagtctaaaacaattgaaccatttagagatgaagaaaatatattacatttgaatgatgattttgagttggaagaagatcatgcaattacaaatgatagtgcttttgaacaagcgattgaagaattaatgttggttgaagaagcgggtgaagcctttgataatgacgcgctgttgagtggagacttaacacctgtatttttcggttcagctttagctaactttggtgtacaaaatttcttaaatgcatatgttgattttgcgccaatgccaaatgcgagacaaacaaaagaagacgttgaagtaagcccgtttgatgattcattttcaggatttatctttaaaattcaagccaacatggaccctaaacaccgtgatagaattgcctttatgcgtgtcgttagtggtgcatttgaacgtggtatggatgttactttgcaacgtactaataaaaagcaaaagatcacacgttcaacgtcatttatggcagacgataaagaaactgtgaatcatgctgtagcaggcgatatcattggactatatgatactggtaattatcaaattggagatactttagttggtggaaaacaaacctacagtttccaagatttaccacaatttacgccagaaatttttatgaaagtttctgctaaaaacgtcatgaaacagaagcatttccataaaggtattgaacaattagtacaagaaggtgcgattcaatactataaaacattacacacaaaccaaattattttaggtgctgttggtcagttacaatttgaagttttcgaacatagaatgaaaaacgaatataatgttgatgttgttatggagccagtaggccgtaaaattgcacgttggattgaaaatgaagaccaaattacagataagatgaacacatcaagatcgattttagtgaaagatagatatgacgatttagtattcttatttgaaaatgaatttgcaacaagatggtttgaagagaaattccctgaaattaaattgtatagtttactttaacagctcaattgtataatcgaatttgttacattaaaaataattgtttcgttgaagaaaaataaattgtatattttaaaagaaaaaggtatactatgatgtatcaaatgaataacctatggcattttgtcagaggggagtaacttaagaatcatgaccgtataaatgattcgacactttatcgtcattacgaagatatcttccggtaaagtgggcaatttaaattgcttagtgagacctttgctatttatttagcataggtctttttgtttgtacttaacttatttatttaaaggagttgtacatgttaatggatccaagtttgatcttaccttatttatgggtacttgtcgttttagtatttttagaaggcttattagcagcagataacgcgattgttatggctgtaatggttaagcacttaccacccgaacaacgtaaaaaagctttgttttacggtttgttaggtgcatttgtatttagatttttagcattattcttaattagtattatcgcgaacttttggtttattcaagctgcaggagcggtttacttaatttatatgtcaatcaaaaatctgtggcagttctttaaacacccagaaattgaaagtcctgaagctggagatgatcatcattatgatgaatctggtgaagagattaaagcaagtaacaaatcattctggggaactgtgttgaaaatagaatttgcagatatcgcatttgccattgattctatgcttgctgctttagctattgctgtaacacttcctaaagttggtattcactttggtggtatggacttaggtcagttcgtagtcatgttcctaggtggaatgattggtgttattctaatgcgttatgcagcaacatggtttgtagagctattaaacaaatatccaggacttgaaggtgcagccttcgcgatcgttggttgggtaggtgttaaattagttgtcatggtattagcgcacccagacatcgctgtattgcctgagcacttcccacatggcgtattatggcaatctattttctggacagtactaattggattagtaattatcggttggttaggttcagttgttaaaaataaaaaatcgcataaataattgatgtgaagcggacaatcttaatttagtttaaggttgtcctttttcatttaattgagtgatttatgaaaaatggattttgaagaatgtgaatcaaaagatgcgatatagtattaagaaaatgtgccttttatatttagcattttttcaatagaaattatatagattttaaagcaaattaggtgttaatgtgtcataatgataagtgattttattgaatggagtggacattagtggatattggtaaaaaacatgtaattcctaaaagtcagtaccgacgtaagcgtcgtgaattcttccacaacgaagacagagaagaaaatttaaatcaacatcaagataaacaaaatatagataatacaacatcaaaaaaagcagataagcaaatacataaagattcaattgataagcacgaacgttttaaaaatagtttatcatcgcatttagaacagagaaaccgtgatgttaatgagaataaagctgaagaaagtaaaagtaatcaggatagtaagtcagcatataacagagatcattatttaacagacgatgtatctaaaaaacaaaattcattagattcagtggaccaagatacagagaaatcaaaatattatgagcaaaattctgaagcgactttatcaactaaatcaaccgataaagtagaatcaactgaaatgagaaagctaagttcagataaaaacaaagttggtcatgaagagcaacatgtactttctaaaccttcagaacatgataaagagactagaattgattctgagtcttcaagaactgattcagacagctcgatgcagacagagaaaataaaaaaagacagttcagatggaaataaaagtagtaatctgaaatctgaagtaatatcagacaaatcaaatacagtaccaaaattgtcggaatctgatgatgaagtaaataatcagaagccattaactttaccggaagaacagaaattgaaaagacagcaaagtcaaaatgagcaaacaaaaacctatacatatggtgatagcgaacaaaatgacaagtctaatcatgaaaatgatttaagtcatcatataccatcgataagtgatgataaagataacgtcatgagagaaaatcatattgttgacgataatcctgataatgatatcaatacaccatcattatcaaaaacagatgacgatcgaaaacttgatgaaaaaattcatgttgaagataaacataaacaaaatgcagactcgtctgaaacggtgggatatcaaagtcagtcaactgcatctcatcgtagcactgaaaaaagaaatatttctattaatgaccatgataaattaaacggtcaaaaaacaaatacaaagacatcggcaaataataatcaaaaaaaggctacatcaaaattgaacaaagggcgcgctacgaataataattatagtgacattttgaaaaagttttggatgatgtattggcctaaattagttattctaatgggtattattattctaattgttattttgaatgccatttttaataatgtgaacaaaaatgatcgcatgaatgataataatgatgcagatgctcaaaaatatacgacaacgatgaaaaatgccaataacacagttaaatcggtcgttacagttgaaaatgaaacatcaaaagattcatcattacctaaagataaagcatctcaagacgaagtgggatcaggtgttgtatataaaaaatctggagatacgttatatattgttacgaatgcacacgttgtcggtgataaagaaaatcaaaaaataactttctcgaataataaaagtgttgttgggaaagtgcttggtaaagataaatggtcagatttagctgttgttaaagcaacttcttcagacagttcagtgaaagagatagctattggagattcaaataatttagtgttaggagagccaatattagtcgtaggtaatccacttggtgtagactttaaaggcactgtgacagaaggtattatttcaggtctgaacagaaatgttcctattgatttcgataaagataataaatatgatatgttgatgaaagctttccaaattgatgcatcagtaaatccaggtaactcgggtggtgctgtcgtcaatagagaaggaaaattaataggtgtagttgcagctaaaattagtatgccaaacgttgaaaatatgtcatttgcaatacctgttaatgaagtacaaaagattgtaaaagatttagaaacaaaaggtaaaattgactatcccgatgtaggtgttaaaatgaagaatattgccagtctaaatagttttgaaagacaagcagttaaattgccaggaaaagttaagaacggtgttgttgtagatcaagttgacaacaatggtttagcagatcaatctggtctgaaaaaaggtgatgtaattactgaattagatggcaaacttttagaagatgatttacgctttaggcagattatatttagtcataaagatgacttgaaatcaattacagcgaagatttatagagatggtaaagagaaaaaaattaatattaaactaaaataatgttgaggtgaacaacgtgtcaatttttagccagtttttaaaaagatcaagccctcaacaaggtattgtattgtactatatcgtcgcaattgtcattgcatttttattattaaacttaccgtatgttcataaaccaggtgtagaagtaaatccaattgacacattatttgttgccgtatccggaattagtgttactggattgtctccgataagtattgtcgatacctattctacatttggacaattaattatcctcgtgatattaaatattggtggaattggcgtcatggcaattggtacgatgttatgggtggtactaggtaaacatattggaattagagaacgtcagttaattatgttagataataacaaaaacactatgagtggtaccgtcaaattgattattgatattgtaaaatcaatatttgtaatcgaactcgtaggagccatgttattagcattttacttttatcgagataatccagatttaaaatatgcaatcatgcaaggtgtttttgtttctatttctgccactaccaatggtggattagatattacaggtaagtcattaattccttatgcacatgattattttgtacaagcgatagttatatttttaataattttaggatcaatcggcttcccagtattattagaagttaaagcttatattcaaaatagggttactaattttagattttcattatttactaaaattacgacatcaacatatttattcctatttattgttggggtattagccattctattatttgaacataaccatgcgttcaaaggtttaagttggcatcaatcgttattctattcgctgtttcaatcagcgactacaagaagtgcgggtcttcaaacaattgatgtgacaacactaagtgaccccactaatattatcatgggtattttaatgtttataggatcttcgccaagttcggttggtggcggtattcgtacaacaactttcgctattttaattttgtttttaattaactttagtaataatgccgataaaacatccattaaagtttacaatagagaagtacacattatggatattcaacgttcatttgcagtatttacaatggcgacaattttaacatttttaggaatgctaattatatcagctactgaaaatggtaagcttacatttttacaagtattttttgaagtcatgtctgcatttggaacttgtggactatcgcttggtgtcacaagtgatattagtgatatttctaaggtcgtactaatgatactcatgtttataggacgtgttggcttaatatcatttatcattatgatagcaggacgtcgagaaccagataaattccattatccaaaagaacgtattcaaataggataatataatagcaatctaagtttagttaatgtagattttaactggaacttagattgcttttttagtttgtatttttaacttattttataagacgattggtttcgaaaatggtaaactagtaacaatgagaggtgtaacatgatggaaaaaaatgaaaacattaatgtagagattttaactacgtcagatatgcatagtcatttcttaaatggtgattatggttcaaatatttatagagctggtacttatgttaaccaagtaagagcacaaaatcatcgcgtcattttattagatagtggcggaagtttagctggctcgttagcggcctattattatgctattgttgcaccttataaacgacatccaatgataaagttaatgaacagaatgcattatgatgctagcggtgtgagtccaagtgaattcaagtttggtttatcatttttaactcgttcaattgctttggcacgttttccatggttatcagcaaatattgaatacaatgttactaaggagccttatttttcaactccatattgtattaaacattttggtgacttaaaaattgctatcgtaggcgtcacagcagatggtttaatggaaaatgagtattctgaaatggagcaagatgtatctattgaaaagacattagtggcatcaaaacgttggattagatatatccatgaagttgaagagccagattttttgattgtaatttatcatggtggattgaataaaattagtaatagtacgaaaaataaaaaggcaagttcgaatgaagctgaaaaattaatggaagaactcggtgttatagatttaatgattacagctcatcagcatcaaacaatagtaggtcaagatcatgaaacgtattatgttcaggctggtcaagatgccaaagagcttgtacatctttcgattaattttaaaaagagaacaacaacttatgatgttgaaagcattgattctaaagtgattgacttaaatgagtatgaagaggatcaagaattattagatttaacattctatgatagaaaagcagtggcttattggtcacaggaaatcataagtgataaaggtttgatgttatcagtaaatgggttacaagatttagtctgtcaaacacatccattttcgcaattattacatgatgcaattcaccttgcatttgataatgatataacatgtgtccacgtgcctatgaacggagagaaggggttgagtggacagattcgaaatgaagatttgtatcatgcatacccatatccagataagccaatggatatgacaattagtggtcaaaatatcaaagatatattggagtatagttattcacatttagattttgttaacgagcaattaagcttaacaattattgatgaaacgttatgtacaatgtggcaaggattcaattatgagattgatatgaatcaagaacctgggcaacgagtaatgttagatcaaattgatttgactaagagttatagagttacaatgactgactattgttatcgtaactacaagaattatttgaaaaatgctattatacatgaatcatacgatgaaacaatgagtacattaattgcagagaagttaagagatccgaattatcgtatttcatgtagtgataattttgtagttaaaaacaggtaaatattgctatgtaataaattaattataagtttaacaagtataaaaacctttcttagagaagattatctaggaaaggtttttagaattttaaaattgatataaaagaacagtgaaattctcattcattatatataagtaaacaaaaaagcttaaatggtatataccatttaagcaagtaacggaaacggagggattcgaaccctcgcgccgctttcgcgacctacacccttagcaggggcgcctcttcagccaacttgagtacgtttccaatggctccacaggtaggactcgaacctacgaccgatcggttaacagccgatagctctaccactgagctactgtggattaatttgtatgtgtttgaatatcaagcacaaatattattataacaagattaagttaatttgcaatagataccttaaaaaaatatgcagaacatttacactatatttataaaacattccgcatattttaaaaataaacaatttatttatcttcaaataaagaatagcgtgtcaatgcttcaaacacattcaatgtggctttattataatctattggttggtcgggattttttgatatcatgcgagattgtttatctaccatgtaatagtaaaaaatggaattgttatattgatgccataaactgtggtatgaaacatgaagaatgatagattcattattaataaatgtcactttacatttacgattttttaattctttaatactttcgatataatgcatatttaaccaaatattttcattttgtctgtcagaatgtgttgggaaaaaataagttggaaataatggtgttagtaaaataggtggtttactagaaatgccagtaatgcggtttgtctctgctttcttgccaagataagtattaccataaaatttgcaagagcgttcaatgattttctggactttaaaaggattttgaatacgcgttttgtcaaaccgaattatttcactaccgtttctttgatcgtcatcatcaaatgctggtcgaataaccatgtctcctttgcgtatcacataaatattttgagaatacataagcaaaacctcgctttattaagttttaaaccattaatataaaaatacaattaatgatataaagatattttataataaaattctgagttgtcaagttattattttggtgaaaatgtacaataatttttaactaatagtcagaatattcattgatttcaaaattagaaaaatgtatacttattataaattaaagaaaggtagtggtttctatgaaatacaatactaatgttaaacatacaactttagaagcgtttgtcacaactgtcaatgatttgggtattgaattaattatcaatgaagcacttcgagaggtaagaaaacgacagctcatagaacttatagatgacgcactcgtcaataaagatgaagcagcatttaatcaatatacggcagaatacaaaaatttggaggcatttctcggtgaataacattgattcgaattccataacgcaatcataaaaggactattcttaacatctcatacatgtaagaatagtcctttaatcgtttatgacattaatctaattaattcatgtctatctatgtcaccgaaataatgatataaatcatattctgatagtgcttcttctatgtgctcaaagtcgtgtagacagccaactaatgcattttcaagatcagtgacatctccgacaccaaagaaatcaccgaaaatttttgcatgttcgattttacctcgtttaacatcaaacttaatttgtacaaatcctttttcaaatttttcctcgcgttcaaagttatatttagggtttctaccataattccattcccaagttctatatttgtcgttacttaacttttcaatattttcccaatcttcatccgttaatttatattcttctacttcagtttctccaaagatagttttcaagatgatttttttaaattcttcaatttctaaagggtcatttaaaaattcttgaatgtttgctactcgtttacgaacagatttaataccttttgatttaatcttagctggattaacttttagtgcattctgaacttcgtctaaatcactatttaacatcaacgtaccatgactaaacattctatttttaactttaaccatagcattccctgagattttcgcttgtccaacttgaatatcgttacgaccagttaattcagcatttacgcctaaagattgtaatgcttgaacaattggttcagtgaatttttggaaattgtggaaactgttaccatcatcatctgttataaaactaaagtttaaattgccagtatcatgataaacagcgccaccaccagaaattcttctaactacatcgatgttatgagcatctatatatgtctgatttacttcctctatcgtattttgattctttccaacaatgatagatggtctatttatgtaaaataaaaagtaactttcttctgctggtaaattttttaaaacatattcttccattgctaagtttaaagttggatctgtaatattattattactaatgaatttcattacaatctctcccttatatctatatatattctctacttatttatgccttaactttgctcaaaatgccaattatatactcacaaatcattctaaatatcggcttaaagttacattttattatttttgattgttaatagtttatttgttaagtgaattttagtacaatataatttagttatgatttaaggaggacttaaaatgactgttgcagaagtgggtaacattgttgagtttatggatggattaagaggtcgtgttgaaaaaatcaacgataactctgttattgttgacttaacaattatggaaaattttaatgaccttgatttaccggaaaaaactgttatcaatcataaacgatataagattgttgaataagaaggtaagttataatgaataaaatctcgaaggctttaacttggtttattataagtttcattatatttcatctcatattatttattatgtggggcgaacaccaagaatactggtatttatatacaggtataatgctaattgctggtatcagttatgtattttatcaaagagatattgaatctaagcgattgcttacatcaattggtgttggtattattacggcaattattttaattatgcttcaacttttattctcacttataacttctaatttaagttatagttcattaattaaagaattagcaagaacaggtgtcaattggaagtggcaaatgttagtaactttactttttgtcattccatgtcacgagttatatatgagaactgttttacaaaaagaattaacacatttttcaataccgaaatggatagctatattaataactgcaatttgttctagttcattatttatttatttagataattggtggatagtaacatttatatttgttgcacaagtgatattatcattaagttatgagtatactcgacgcatagcaacaacatccgttgcgcaaattgttgctattatattgttattaatttttaatgcttaaataagcttttcttagacgtatgtgttctaagaaaagcttttttgcttaagaatagcaatacgaagattcgagtcatgcttcattatagtggtaatattttttaacagcaagcggttattattgagattaggttttagtcagtttttattactaaatattttataaaaatggtataatatttttgagcaagttgaattgatggtggctatctgagtaaaggggggtggtgcctatggcattacttaacacttttgaaaggaaaagcctattgtgatatctattgcaaacgcattacatttaatgttaagtttcggtatgtttatcgtcactttcattggtatagtagtagcaataataaatttaagcaataaaaaataaccatcatttcaaaactttgacatagaatgatggttaaagaaaatctcatttagtcaccgtctttttaacgggctcattaggcgacatgttcctgcatgtcgtctttttacatttttatagtaacatatcttttatttaattgtctatttttattagatgtgtaacaaaattttgaagtattttccgtatattgcctgctaaacatgtcagatttgaaaggaaaatcatactgtggtagaaatcaattatgattatatggtagtacttataaataagtgatttctattgaatatgtaatgaagttcatatattaatataactttcattgatatagaagtcgcaatgattaatttaaacaataaaaaacaaccatcatttccaaactttgacaacgaatgatggttaaagaaaatctcatttagtcaccgtctttttaacgggctcaataggcgacatgttcctgcatatcgtctatttatacactgcacaatttaataataatacaattatactttgatgtccatttaacataaagtggttgaaatttgcagcaaataaattaaccttgactattttcagaaaattctgtataaataacgaaaaagagatatggattaaatatgaagaggtgtttttatagaagaataaaatttttggcactatattatatttaactttagcacttggattatcaacagcagcttatgcatctacagaatacgcagaaggaggcacttggagtcatggtgtcggcagtaagtatgtttggtcgtattattatcatggtcataaaggacatggtgcaacagctattggaaaatatagatcatttagtggttatacaagagctggtgtaaaagcaaaagcatcagctactaaacataattggtgggtcaatagagcgtattataacatttattaaatactaaaaaatcatagaaaataaacaacgcaaaaggtacaacatgaaatggttcaaattaatacttgatgttacaatcttcattctgattgctatattgttatttgtttatacatataaagaaaacgaagaaatattgcctgatactaaataccctatagcggtaactgactggaataaaaaatatagtaaaaatgagatttataaacgtatagatcaattcgctaaaaatgagaacgtagcaatctataaatcaacttcaaattatacaaacaaaaacgtagataaagatatatatgtatttaataaatcaaaagcagcaactatcactccttttaatgctaaatataacattcattatttaagtgacgacgaagtattaaaaaaagatatcaaagggagttattttgtaaaagacaaaaattttgacgtgtctaaattcataaattttttaaaagaatatggtgttactgctgaatcatacaaaatagatcatatgatgattgccgttggtgtcattaaacaaatgaatatagtagttccattatcctcacttttaatcgtttattttatttattatattttcgaaaagaacattaatttcaaagcgtatgcgattaagtatttaaatggttttacattaagaaaaataattttcgaaaatttttcaaagaaatgcacgtattgggtaacgttaatcataactcaaattcttttaactacaagtgtactttggatattaaattacacgggtaatttagatttattcatattaagaatagttctgctttcatgtcttttcattttaacgattagtgttattaatttatggactttcttaatgttactaaatttaaatattgcaaatatgattaaaggtaagcagcactttaaaacaattcgttttattaatacagtttgtaaaagtattctcttagtactaatagctaatgtaatgatagaaaatactagtgttattaaagatttgaataaaataaaagaaactgagaaatattggaatgtattagatgattattacacgattgaatttgcaccttatcacgaaacaaaacaaagtttgattgataatatggtgcgatcagaacaattagtaaaggctagtgaagcagaaaataatgcgattttattcaaaccaaagggtgactccgttgacaatgacaacttttcgcctgatgaggggaatgtaatattagtaaataatcagttctggtcgatttattacaagcagtttcaacctgatattccgataaaaaatcaaaaaaataatgtcgaagtaattattccacaaaagtttcatgcaatgcgtaatgaaatcaatcaagcatatcattcatggtttgaatttgtacaaaataaaaataataaagagaataagttatctatacagtttatcaacaaaaatgattgtcgaattttttcatttgatgcacgagatagtcgccatttgtcatttatagaggcgccaatcattgtgaatgttcaggcatcagatttatcgaatgatttttattatgccatgatcagtcaaggcgggtatttattcaaaaattatgacgcgctagtaaaaaatattgaaaagtatcatcttgatggggaaatcagtggaataaccaattataaagatagcgtgatggaaatgtatcatgaaaacaatttgaaattaacagtactcaacttttcacaaatcattatcgcaatcattttaataattattattttatttgatgtgaaatattattttgaacagcatcgaaaattactcgtaatcaaaaagctatatggttattcaacattaagagccaattaccaatacttattaataaataatatagttgttatttttattggaatattgacgaatgtaattttacattctcactatataatgatgttatttgcaacgattcttgtcgttcaaatattattgcagatttgcagcctatactatcatggccgacgttttaatgaagttatcaaggagttttaactatgaaatttatcattgcaatattattaggattaatattatccattactattgcttttacaatcatacatcatcctatacttgatcgttttaatcctttcttaaaaacggagtatagttatgccaaagtgccaaaaggtacgcaacaatatgttaatattacggcttatagtgaaagaggggaaaagcttgattataaattaacatttaatggattttcacctagtagaacgtatgtcgaaataaagcataaagggcaatatgtcatatcgatcacatatgttgaaaaagaggatacaccaaaagaggtaagacaagaatgatagaattaaaagatttaaccatacaaaaaggtaatacacatattttgaagaaacttaatttgaaatttcaatgtggaaaatcatatgcacttattggtaaaagtggatgcggtaaatctacattattaaatactattgctggacttgaaaaaacaggaaaacaatatgtctattttaatggtcaattagaacaatttaaatctaatttttacagagataaattaggatatttatttcaaaattatggattaatcgataatttgacagtaaatgaaaatttagatattggattagcatataaaaaaataagtaagaaagaaaaagaacaaataaagatacgttatatagaacagtttggtctgtcaaacagtttaaaaagaaaagttcatacgctaagtggaggtgaacaacaacgtgtcgctttaattagaatgatgttaaaagatccgattgttatgttagctgatgaaccaacgggtgcgttagatcctaaaacaggacagatgattattcaatcattatttggtttggtcgatgaaaataaagtgctgattttagcaacacatgatatggctattgcaaatcaatgtgacgaaataatagatttagaacagtatagaaaagtagcatctatgtgatatccaaaagataaaattaaaagccaatcaatgggaaatgttgacttcaacactccgtttgattggcttttatactgtgttactaagttatgaaagtaacaacggcaaactgaaaaaaagcaatataataatatttaatacgattagtaataaatgtaattgatttttcgttttaatatagcaaaaaacaatgactaaagataacaacaatatcatgattgcacctgggaagaaccataatgctgaagctgtgtaccaaatcattggtaacgccataataataaaagatataagacaagaaaggataccaataatattataagttctagtcaaaattacacctccaattttcactttaaaatgacatgcgtaaaaaaatcattttaaatacatcatacaataaaattaaattgtgcggtagaagaatttgaaattaaattgaattgtttttggtagttggtatatttataacactctgcaaaagaatgtagcaaaattagataaattagattatttaaaattatgcgtgatattattatttttatcatgcaaataattataataacaatatttaattattgtatttacagttgattaatagggttgtgaagtataaaattattttgtaaaacaattttgttattaagaggtgcgctatggaaaaggggattttcaattacgataatgcgaatgtattaaaattagatactaatcagttaaatgaaaacataaaagtcattgacgatatatttaaaaattatgagcagatagagccaactatagaagtcgaaaatggaaatacaaaattaaaattaaatggatattttattgcgtcaattataagcccattaaatttaaataaacttaataatttatatgttgaagaagaattttatcatacatataacgaattaattgttaaatatactgaggtaaaggaataattataatgaaaaaaatatttatgatggtacatgagttagatgtgaataaaggtggtatgacctcttcgatgttcaatagaagtaaagagttttatgatgcggacatacctgctgatattgttactttcgattacaaaggaaactatgatgaaattattaaagctttgaaaaaacaaggtaaaatggatcgaagaacgaaaatgtataatgtatttgagtattttaaacaaatttcaaataataaacattttaagtctaataaattgttatataaacatatttcagaaagactaaaaaatacgattgaaattgaagagagtaaaggtatttcaagatattttgatataacgactggtacatatattgcctacattagaaaaagtaaatctgaaaaagtgattgatttctttaaagataataaacgaattgaacggtttagttttatagataataaagtgcatatgaaggaaacatttaatgtagataataaagtttgttatcaagtattttatgatgaaaagggatacccatatatttcaaggaatattaatgctaataatggtgctgtaggtaaaacttatgtgttagttaataaaaaagaatttaaaaacaatttagcactgtgtgtttactatttagaaaaactaataaaagattctaaagatagtattatgatttgtgatggaccagggagttttccaaaaatgtttaatacaaatcataaaaatgctcagaaatatggcgttattcatgttaatcatcatgaaaatttcgatgatacgggtgcatttaaaaaaagtgagaaatatattattgagaatgcgaataaaattaacggtgtaattgtattaacagaggcacaaagattagatattcttaatcaatttgatgtagaaaatattttcactattagcaattttgttaagatacataatgctccaaaacattttcaaactgaaaaaatcgtaggtcatatttctagaatggtaccaacgaagcgaattgatttgcttattgaagtggctgagttagtcgtaaaaaaagataatgctgttaaatttcatatatatggagaaggatctgtcaaagataaaatagctaaaatgattgaagataaaaatttagaaagaaatgtttttcttaaaggatatacaacaactccacaaaaatgcttggaagattttaaattagtcgtttctacatctcaatatgaaggtcaagggttaagtatgatagaagcaatgatttctaaaaggcctgttgttgcctttgatatcaaatacgggccaagtgattttatagaagataataaaaatggttatttaatagaaaaccataatattaacgacatggctgataaaatattaaagcttgttaataatgatgttttagcagcggagtttggttcgaaagcgagagaaaacattatagaaaaatattcaacggaatcaatattagaaaaatggttaaatcttttcaatagctaaatgaaaaaatcctaggtattcatgagtacctaggatttttacgcatgatatatacaaaaaaagagaggatagtcctctcaaataatagttaataaaattgtagccatttcttccagctgtaactactaatacaagctaagttcattacgatatgtatgatttcaaattcataaccacttacatatcctcttgtaagtttaagtgtgaagattgagcctaacataacacaaatataaaaaacattaacataaggcgttaaaaagccgataataagtgctaaacctccaacaacttcaccaattgacatcaatactgcgatggtaggtggtaaacctaaagagcctaagaagtgaattgttccatctaaatcaacaaatttcaaagtaccatgcactaagaatgatgttgctaacatccatctaattaaaagcatacctaatttcatcatgtcacctccaacattcgtatttttaaaacatagtccaaattatatttgtaaacatgtggaaagtaaagattttttataagattaattattaaatatttattaaatattctattgtattgaacaattgttgtagaaagatgtttaagttatcagttactttttgtatttataaataaagattagtacatcatagtgcaaagattatagggaaatgaattaacaattgcatcgctatttatgaatcgtaaacactattatgaaattgcgagagtagtatggacaattagaatgatggtttgagataaatgagtgttattaaccagtgcgtcattttcaaaattagatgccatttgctgtttataataagaagatttgataattaactatgataagaaaaaataataatcccctaaatacattataaacaaattaaatgctaaaataataatatagatttctactaaagttgtttggaggtaaatgtgtgaataggaatatcgttaaactagttgtgtttatgctaattttagttgtagcagtagcgggttgtggtcaaaaagatactgaagagaaaactgaaatgacgacaataaaagatgaattaggaactgaaaaaattaagaaaaatcctaaacgtgttgttgtattagaatatagttttgctgattatttagcggcattagatatgaaacctgttggtattgcagatgatggcagcactaaaaatataacaaagtcagtaagagataagattggggcatatgaatcggttggatctagaccgcaaccgaatatggaagtgataagtaaattaaaaccggatttgatcattgcagatgttagcagacataagaaaatcaaatcagaattgagcaaaattgctccgacaatcatgttagttagcggtacgggagattataatgcaaatattgaagcatttaaaacagtcgctaaagcagtaggcaaagagaaagaaggcgagaagcgtctggaaaagcatgataaaatattagcggagattagaaagaaaattgaacagagtacgttaaaatctgcatttgcattcggtatctcaagagcaggtatgtttattaataatgaagatacatttatgggacaattcttaattaaaatgggtattcaacctgaagtcacaaaagacaaaactacgcatattggtaaacgcaagggtggtccttatatatatttaaataatgaagaacttgccaatatcaatccaaaagttatgattttagccactgacggaaaaacggacaaaaatagaacgaaattcattgatcctgcagtttggaaatcattaaaagctgtgaaagataacaaagtttatgacgttgaccgaaataagtggttgaaatcaagggggattatcgcaagtgaaagtatggcagaagatttagaaaaaattgcagaaaaagcaaaataaaaatacagcgctactcgtaaatcatataagagtggcgctgtatttttaattatgtttattatctgtcggatgtgatgatttacctgaaagtttatttcgaataaatttaattacataaccgacaaggattgttttaacaattcttttaatgaattggcgcatcgttacatacctcatttctctatatcttacgaactatatacccattcatatatgctttttaaacgtcattgtcacaatttaatttttagggaatataatataaccatctttatctgcttttttagtaaaaatgacaaaaattgcatgtattattgagatgatggtagggatacctgtccagaaaaataataagtgaaaaagaccttgtccaaatttatcagcataaaatttatgaatacctaaacctccaagaaataatgcaacaataacataaatggctttattgactttcatttgtaaatcctccttaactataattctacttaaattcgttgtgaaaaccaatatttctaactttagaattttcaaactttctaaaattataagtatatctttttaaaataagctagaatttctatataataaatgttaataacgtaaaagggaatgatgacatagtgatacgtcaagcacgtccagaggaccgatttgatattgcgaagttagtttatatggtttgggatgatatggaattagaattggtaaagcatctacctaaagacatggtattagatgcaattgaaaaaagctgtgttgatgcaacatatcgaactttttatcagcatattttagtttatgaagtagaaaataaagtagcaggttgtattattagctatagtggtgaaaatgaattgaaatacgaaaaagcatgggaactacttgacttgccagaagaaataaaacaatatggcacgccattacctgtaaaagaagctaaagacgatgagtattatatagaaacaattgcgacatttgcagcatatagaggtagaggcatcgcgacaaagttattaacgtcattacttgaatcaaatacacatgttaaatggagtttgaattgcgatattaataatgaagcagcattaaagttatataaaaaagtaggctttatatctgatggacagattgaattatacaagcacatgtatcatcatttaattgttaaataaaaaaactcgacagttcgatgtaagtcgattgccgagtagtatcattttctattaaatgcctgcaaataatgcactaatataaatacctaatgcatataataaaccgaaaaatgtatttgttttaccagcagcagccattgctggcatcattgtaggcggtgtatcattcttcttgaaacgtctgataactttaacaggcattgggaatgataacaacgcaagtaagtaaaataatgagccaccaggtttaataatgatcgtaagtacaataaaggcataagcgataaagtacatgattgccataaatgttaaagaagcatttttacctaatagaatgggtaaagttttgcgaccacttgctttatctttgacacggtcgcgaatattgttagccatattaattaaaccgatagtgattactataggtacacttaaccaaattacataactttgaatattgccagtttgaataaagaatgcaataacgataataaacatacccataaatacgcctgagaataattcaccgaaaggcgtccatgaaatagggaaagggccacctgtatataggtaaccaacagccatacatactaatccaactggtaataaccaaaatgaagagttagcagctaaaaacaaacctaatattgctgctaagatgtaaaatgcaatggctaatcgtagcacaagctctgggctcataccgttgcgaacaatggcaccaccaatgcctacagattcatgatcatcaaggccttttttataatcatagtattcattaaacatattagttgctgcttgaataagtaagcatgctagtaacatggcaatgaataggctgattttaatatgatcttcgctaccaagaaaatatattttagatgctgctgtaccaactaaaacgggtactacggaagcagttaatgtatgaggacgcattaaatgccaatatttcttaactgtagaatattgctgatattgattactcattgaatacaaaacctctttaaatcatattttttataacaaagatattttaatagaaagtagcataaaggtcaattgacgtgaaaaattgcaagataagtttaagcaattcttgtaacacaattatccaaaaatgatacaatataataatgagtgaaaaaagacgaagaaagaagtgaaatggatggctacgggcgtattagaggacgatattgtcaaagagatatatggcagctcaaaggaatgggtttcagttgaagtgaaattatcacagtcactagacccgagcacattatttcatctcactgacaatgaggcaggagatcgcttttatatgcgtttgaatgataatcgaacgtcatattttggctacaaagcaattcaattattcaaaaataattctaaaaataaacaatctatttttaaagactgggaaaaattaaaacataacatcacatttatacatccgcaatctgagaaacatcatcttcgagttgttggagggttccaattttcaagtcataaatcagatgatgaatggcgagagtttggactaaatcattttgtattacctgaagttttaatttcaactgataaaaatgggacatttttaacttatacagttaaaagggaaagttttactgttgaggcattgaacgatttaatggatttgttcaacaatatatcggacatagatgtggacgagcaaattgggggaattactagaaatgaagatatttataaagatgactggcgtcaacttgtagtagaagctatagaatctattaataatgaagaaaaaattgtactagcacgtagacggttaataaagttcgataaagatatcagtattccatatattctaaagcaagcatattctaaagaaaaaaacagttatatattcttgttagaatcacaagattctatattcttttcacaaacacctgaacaattaataaaggtcaataataaaatactatcgactaaagctgtagcaggtacaattaaacgttcacaagatgaggacgaagatacaaaaaatgttgaagcatttttaaaagataataaaaacttaatcgaacatcgatttgttgttgacagtattttacatgatattaaaccttatatcactgaattacattatgataagacgcctaaaattctaaaaaatgatcatttatatcacttgtacactgaaataaaggcgccactgaaggatgattcgtatattagtttaattgataatttacatccaacacctgctttaggtggctatccaaaagaatttgcgatggattttattgaacagaaagaatttggtacacgaggattatatggtgcgccggttggctatatagatatatatgatgattgtgaatttattgttgcaattcgttcgatgcttattaagaaagcacaagcaactttatttgctgggtgtggcattgttaaagattctgatccagatagtgaattggcagaaacgaaccttaagttcacacctatgatgaatgcattaggagtcgatatgaatgggaaatcataaagcagctttaacgaagcaagtttttacatttgcatctgagttatatgcgtacggcgtaagggaagtagttatcagtccgggatcacgctcaacgccacttgcacttgcatttgaagcacatccaaatattaaaacatggatacaccccgatgagcgaagtgcagcgttttttgcagttgggttaattaaaggtagtgaaagacctgtcgctatattatgtacgtcaggtacagcagcagcgaattatacgcctgcaattgctgaaagccaaattagtagaattccattaatcgttttaacaagtgaccgtccgcatgaattaagaagtgtaggcgcaccacaagcgattaatcaagtaaatatgtttaataattatgtaagttatgagttcgatatgcctattgcggatgatagtaaagagaccattgatgcaatttactatcaaatgcaaattgctagtcaatatttatatggaccacataaagggccaattcattttaacttgccatttagagatccgttaacacctgatttgaatgcaacagaattgttaacttctgagatgaagattttaccgcactatcaaaaaagtatagatgcatcggcattaagacacattttaaataagaaaaaaggtttaattattgtaggggatatgcagcaccaagaagttgatcaaatactaacgtattcaacgatatatgatttgcctattttagctgatcctttaagtcatttaagaaaatttgatcatccgaatgttatctgtacatatgatttgctgtttagaagcggcttagacttaaatgtggatttcgtaattcgtgttgggaaaccagtgatttctaaaaagttgaatcaatggttaaagaaaactgatgcatttcaaatattagtgcaaaacaatgataagattgatgtctttccaatagcaccagatatttcatatgagatttctgcgaatgatttctttaggtcattaatggaagacacgacagttaatcgcgtaagttggttagaaaaatggcaatgcttagagaaaaaagggcgtaaagaaattaaatgttatttggaacaagctacagatgagagtgcattcgttggtgaattgattaagaaaacatctgaaaaagatgcgttatttattagtaatagtatgcctatcagagatgtagataacttgttattgaataaaaatatagatgtctatgcgaatcgtggtgcgaatggtattgatggtatcgtttcaactgcactgggtatggctgtgcataaacgaataacattattgataggtgatttgtcattttatcatgatatgaatggactattaatgtcaaaattaaataatattcagatgaatattgtattattgaacaacgatggtggcggtattttttcatatttaccacaaaaagaaagtgcaaccgactattttgaacggttgtttggcacaccgacgggattggatttcgagtatacagctaagttatatcaattcgattttaaacgttttaacagtgtttcagaatttaaaaatgccacattattatctgaaacttcgacgatttatgaattgataacgaatcgcgaagataactttaaacagcatcaaattttatatcagaaattgagtgaaatgattcatgacacattataaatactatgaagcaaacgttgagaccaatcaagttttagtattactgcatggttttcttagcgacagtcgtacttattataatcacatcgataaatatactgatatctgtcatgtcatcactatagacttaccaggacatggcgaagatcagtcttcaatggatgaaacgtggaattttgattatattacgacgttgttagaccgaattttagataaatataaagataaatcaataacattgtttggatattcaatgggtgggcgtgttgcattatattatgcaattaatggtcacatccctatatctaatttgatattagaaagtacgtcaccaggtattaaagaagaagcaaatcaattggaacgccgtcttgttgatgatgcacgtgctaaagtattagacatagcaggtattgaattatttgttaatgattgggaaaagttgccattatttcaatcgcaactagaattaccagttgaaatacaacatcaaataagacaacaacgattgtctcaatcgccacataaaatggccaaagcattaagagattatggtacaggtcaaatgccaaacttatggccgcgcctgaaagaaattaaagtaccaacattaatattagctggagaatatgatgaaaaatttgtacagattgcgaaaaaaatggcaaatttaattcctaatagtaaatgtaaattaatttctgctacaggtcatacaattcatgtggaagatagtgatgaatttgatacaatgatattaggatttttaaaggaggagcaaaatgactaacagacaatgggaaacacttagagaatatgatgaaatcaaatatgaattttacgaagggattgctaaggtaacaataaatcgccctgaagtacgcaatgcgtttacacctaaaacagttgctgaaatgattgacgcattttcacgtgcacgtgatgatcaaaacgtttcagttatcgtattaactggtgaaggtgatttagcattctgttctggtggtgaccagaagaaacgtggacatggtggttatgtaggtgaagaccaaatccctcgcttaaatgtattagatttacagcgtttaattcgtattattccaaaaccggttatcgcgatggtaaaaggttatgctgtaggtggcggtaatgtactaaatgttgtttgtgacttaacgattgctgctgataatgctatttttggacaaactggtcctaaagtaggttcatttgatgcgggttatggttcaggatatttagcacgtatcgttggacataagaaagcacgtgaaatttggtacttatgtcgtcaatacaatgcacaagaagctttagatatgggtctagtaaatacagtggtacctttagagaaagttgaagatgaaactgtgcaatggtgtaaagagattatgaaacactcaccaacagcgttacgattccttaaagcagctatgaatgctgacacagatggtttagctggtttacaacaaatggctggggatgcaacattgctttattacacaactgatgaagcgaaagaaggccgtgatgcgtttaaagaaaaacgtgatcctgacttcgatcaattccctaaattcccataagttattttgaatatgatattaagtcacttgcgtcgtttattagcgacgataggtggcttttttattttataagaatttaaaagggcattttaattaattatcataaagataagatagtttgagaaaaattaatagagaaagaataaatgttaaagattattattacaatgaaaaaacgagctggtgagaaattgaattctcgccaacccgctttatgaagtgaaatcatttaaattagttatactaagcgctcataaacgattggtcgcgaagtgccaataccttgtttggatgacgtttgcatgaggatatgctgtgtatcatcataatcaagaatataaatgatttcttcattatcaatagatgaaaatttaatgcgttgatgtgccgtatctataaaaagaatatgatattgattgtgacttgtatcatcgccatgacgtatacaaattgatttttgtaattgatgattactccaattaccaatgaataaattgatattggtttgttctagatgtgtgagtttggttgtgtcgtaaactaaatttataaattgtagttgatacatagttttacctgcctttaatcaatatctatattactttttagtaacctatcattgaaccataccagttataatcacgattgaatgataaatgtaataggcttgaatctgcatcttggattgataattctgtatcccaaggattccagtaaataagtttttcttggtcattaattttagcattaccaacaactgctagcgcatgtcctaaatgtgggtcattagggttttgagatacactttgtgcaaggatcataattcctacattatcttttgtaagttgatcaacttgttcatatgatggtacgccttcttgataatgaatatctctgccttgtgatttaccgtattcaatcatttgattagggaatgttgcacaattaggaaggtcttgctcacttacttcagggtataatgtacgcataatatcatgtgcattataagtgtctgtatttttagttgcatttaataatgctgccatactgaatcctgcacaccatgagttatcgaattgttgttctctaattttgaagttttttaatgtattttcatattgaacttgatcttcttgtatcgcttcgttttcttcaactttagtaggtgttactgtattttttaactcttgtttcaattttgctgaaactgttttagcactttctttttcttttacattaccaggtagaggcgtagcttttactaatctaactttgccatcttcttcaaaataaaaccctttttcatcagtaagaacagtgatatttgaatttttatctttaatttggtctaaatctttagcgatgaagtttgaaattttaacactgtaattcatgtcttcttttgatttgtttaaatcatctttatttttagggctaagtgttaaagtataaacaattttaccgtcttttataactggataatagtaactattatcttcttcaccattaaatttataaattttaaaagcttcgccaagttcatatttaccagtttttgcattactttgtttatctaatgctttagcataaccagcaaattgttgttgtgctagatcttttactttttgaggtactttgtcactcttaacattaatttctagctgtttagagtgtgtatcggctttggctttattgttattagcaaatgcgcctagtgataaaataagcattgaaaccattatgatgcttataatattgaatactctagatttacatgaactattcatataataccctccatttaaatcaaaatattttacgttgctaagactttgcttctatttactaaatctaaattaagatgaagtttatgcagcgtcagggttgtctgaattattgttatcgctattgtctggattatcagggttgttagggttgtcagggttatttggttcatctgggttgttagggttatcaggattgttagggttatcaggattatctgggttattaggttggtcatcgttggcaaaatggatatcttcaatattttgttttaagaagttgcgtacattttcattaataaataccgcaccattaaattcatttggtacaccgccccaatgaattccgatcacttcatttttttcattaaatacaggtgaacctgagttaccaccagttgtacttaaatcatattgcatagcttcgcctttgaggtaagtgatttttcctttactttcccacattgttgctacaggtttatcaccaggatatcctgttacagtaatattttggttaacttgtgtttcagcattattactcattgttgctggtttaactacttcaccaatatgtttgttttgttcattaggggagaatttaactattgctaaatcaccttcgcctgaatatttagtgatttgttcagcagtgaaaccaccatttggataattgtcttggttaattgcagaagggaatgcttttaaagcatgaggatcaccgtgcgtagcatctacgacgtgtttatttgttaaaagagtatctttacctacaactacaccggaagcaataaatgtaccagtaggtgcttcaacttgaatataagttacgggtgcataatgaccattcattgtatctgtgatttggtgacgatcattatttggtaatataacatttgcgtgttcacgttgttctaatggtttaaggttaccgcctttttgaatcttaggtgtttgctgtttgcttgactgcgtttgttgtggatgattgtccatagcctttgatgataacgcgtttgctgctggagaactcacaagtgtcgctgttgtcaaagttgcaacgaataaagaactaacttttaaaaatttacctttcatctaaaaacctccaaaaaatttatttacaagttaaatataacactaaaaatttttaagtcaataagaatatataaataaattaaaaagtttttgtaaagattagagtttacaaaaacattaaggggattaaaattgaattgtattatactttattcaattgagttaaattgataagatcgtcaattgtttgcatttatctaaaagaataaataagaaaggaattgagagcgaatggaaagtatttgtttataataataaatagtaacttttgaataataattgtttggccaaaggtagattaatatgaatggtgatatattatttgagtgcttaagtttcgaagaacaattataagttagcatattaaaaccttttgatagaatcattttgagtgaggtgtttaaaggagaggaatataactcggtagtatttacagtctctatagagtattatttaaaacttatagaatataaaaaactgaacgtactatgaatttagttcacgacgtccagttcaacatatcatttttatttagtatttaaatatttagcaagtctcttcataccttcttttaaaacatccatttcataagcataggaaatccttacaaatcctttaccgaattctgtaaaggatgagcctggaacgattgctaaatgtgttgattcaagtaaatcgacacaaaattcgaaatcgtcatcggtgatatgtttaatacttgggaaaatataaaacgcgccttcaggttgagcggtaatctcaaaacctaatttagttaattcagatactaaataatttcttcgttctacataagcttcgttcatatatttaggagcttctaatccttcgttaagtgctgttatacatgctatttgagctggaacattggcacaaatacaattataggcgtgcataaatgttaatttatcaatcaaatattgaggtcctaatagaaaaccaattcttattccggttgctgagtgtgatttacttaaaccaccaattaatattaattgatcacgaatgtcttcaaattcagcgaaggatacatgtttaccactaaatgtattttcagcataaatctcatcgctaataataaatatcggatatttttttaatacatttacgatatttaaaacttcatttctttttaaaactacgccagttggattagtcggataatttaacaagacagcttttgtctttggagaaatatgactttctaatgcatcaggtgtaattttaaattgtgttgctgttgtatcaatataaattggtttaccacctagtacttcgatgagtggtatgtagcctgcataaattggtcccggtattataatttcatctccaggctctatgatagaacgtaacgttgtgtctattgcttcacttgctccatttgtcacaataatttcttcaggatcataggaaaaatgataacgatttttgaagtattgactaattgcttcgcgagtttctaataaccctttattgtgagagtatgatgtcttgtcattgttaatagcatcaatatatgcctttttcacaacatcaggcatcgggaagtctggttggccaatagttaaattaacacaatcatccaaattattcatacgatttgaaaattggcgaatacttggtgctcttaaatatttagaattagaatttaaagaaagtttcatttgtgacacctcaaatataaatcaaatattgtctaaaaatttagaaattaataatatcataacatacttttaaagcaaaaaagggtaaattacttaagctttatttgaaaaacgaaaaatgtctaaatacactgtagtaactacttttcaaaatgaataaagtggttacagttaatgtacttagacagtataaaattatgaatctttaaactgtgatggtctttgtaaattaattattggatttgtccatttacaaacaaagtttgtagataatacatatacgatgattacagatatacttattaaataaagataagtcattaatgatataggattatcgaatgggtaccattcaaatcctctaacaatgccaataattaaaccatgtaataaatatacgtatagcgtacgactaccaatataagtatataattttttctttgttgacattaaatttagaaacgcagtcattgcgattaatataattccatataatataagtcgtttaaaaggactgaatatactctgtccttcattttcaagtgaagtatatggtgaacttcccaataaccaatctgcattgataggatgaatcacgtaaacgataaaaaacaaaataaaggtaatgatagatactggtattagttttttatttttaaaaatagccgtatgttttttggtgaaaatgtaacctagataaaatattgggaaaaatacgattgtccttgaaatgcttaagtagctatcgatgttatctgaaaaacctgctccaatagatataataattgaaactgatagcactttatatggattaaatcttctaactattactaaaatgacatgaaagaaaaatagcgtgatcaaaaaccataacgcaaatactgggttaaaaggatcaagttgtaattcgtcacttttacctgttaagaaataataaattgaaaagaatgcaaaaaatatcatataaggtactatcaaacgttttgaaattttttctaaatagtatggtttatcaatatttttcgcgaaataaccagatataaacaaaaatgttggcatatggaaactataaataactaggtataatgctgataaatatttatcgccactagtgtagggttgtaacatatgtccaaatacgactaataatattaaaattgctcttgcgttgtcaaaaaaataatctctctcttttaatgaagtcatattttatctcctttatgtccataagactcttactaatttattatattttgtattagttatgcaacaaatttgtctattgtgtcgaatagtattgtaaaaattataaaaaaagcatataatattataaataatatgtagtggagtagaacaacatgtataaacaacttgaaaaacttattacactgactaacaatgacttaaacttagtgaatagaagatttggacaacgcacggatatcacatctgaacagctagaacttctccgtattttatttaattacgatcgcttatcacagtatgatttgacgatgaagattagcagggaacaatctatagtttcaaggtggattaagaaattagttttgaaagggtacatcacaagtcaacaatctagcgaagatttaagatgtaaagaattaattttgactgatcaagcacgtacattaatttcacaaataaataatgcacgttgcgaattgattgaagcaagatgtcaatgtttatcggaagtcgaattagacaatttaaatcaattacttgataagttaaatcaacgacgcatatcgttgtaacacgacaatagcaaacacataatttagtgtcattgtgcacacaataaaaattgaatcatgaattacaagcaaaagtagcggtgattgttaaaattgatggtaaacaatcaccgctatttttgcttgtgtatgtataaaaaagggatcaaaggtcatcccccatgattgatagtgggggatgacttttgatcctatgttcatgttgcttatttatattgtgggatgtcgaagtatttgccgacttcgccaattttatcatagtagcctttgatgattttagcattgatgttagcccaatctacatctgtagcatattggtgtgttcctggatgtgcaggattccatctcattttgtaaagtgtattttgaccagcttttacatatgagttgccgatgaatttagcaccaccaacgattgcttttgatactgtgtcccaaccagcttgtttagcatatttaataccttcacgtaaaggatcgttatcatatgcagcaataccaaatacgttatggtatttcgtgtttgagttagttacaactttgttgttcactacatctgcacctttcgctaattgagaagtaccgttacctgtttctaatagggcatgtgagataagataaacttcattaatgccatacatttgagcagctttgttaaatgcagcaccttggttttctaatacacctttaccttttaagaattgattaattttatcaatagaaatattttgtggttggtctaagcgtaagaattgatattttaatgctggatcttgagctaaacgcttcgtatccattgcatgcttaacatcattaaagttagcatctgtccacttacctggtacacgttgtacttgtggtttatattgtaaaccagcttgtatttgagcaacttggtttaatgtcatacctgtttgattatacttaattaattctttagctaaatcagttgatttaatccatgctaatttaccgttagataatttaccatagtaccaagtttgtccattaatgacttgttctttaacaactgcgaatggttgttcattaaatgcttttaatgagtatttagctgtatcagaatttggtgttacatagtaataaccattaccatttttaattacataagtgtagttataatctttggcagctgatgtagttggtttcacagcagttggtgcagttaaatcttttgcatttacccaaccagtgcggttattaatagtaccgtataaataaacatctttgcctacagatacttgtttcgttgcattaaatgtaccttgagcaatgttattgcctgttaaaatgacttggtttttagtaccccaaggaaccattgataagccgttatttgatttattaacagtatatttttgagtcgttttaacttctttgcctaagttttgaacatttaagtcttttacattgaaccaacctaatgggatgttatggcttgtattgtttaataatacatacgtttcattaccatgagcacgctcttttgttacatagaacgtacggtctgcatatttcgcaccgtttttcgctgttttttcataaacagaagcacgaataccagtgttgtttggtttaacttgagcaatcttgctaactgtttgagtcgtttgtggtttagtaacagtataagcttttacagctgtttttggttgtgctactgcttttttaggtgcagcaggtacagctaaatatgctttactaacccaaccagatttaccatttacagttccaaataaatagatagatttatcaatttgttgttgcttagtcgctttaaaagtttggttacctgtaccagaaaccgcaccagcttcttgtttataagtgccccaaggtactgaatataatttagtgcctggttttactgtatatgtttgcattacatttacaggtgattttgcattgttataaataacgtcaccttgtttaacccaaccaattaaagttggactattgtaatctttaactaagtagaatttgtttccacctagacttgcttcttttgttacagcaaatgttttttgaacttctttcgttggcttaccagttttgtcataaactgtagtgaataagccattgtttttagcattaatttgagcaacaccgtttaatgatgaaactgttaatttattatttgttgtaggtgttgatggcttaggtgttggtgtaggcgtaggtttagcagtatcaactaaatatgctttacttacccaaccagatttaccattcacagagccatataaataaattgatttatcaatttgttgttgctttgaagccttaaatgtttggtttccagagccagacacgctaccagcaacttgtttagatgtaccccaaggtactgtataaagtttcgtaccaggtttgattgaatatgattgatttacatttacaggtgatttagctgtgttgtaaaccacatcgccttctttaacccaaccaaatttattaccagaattgtaatcttgaacaagatagaatttttgattacctaatgtagctgttttagatacagcaaatgttttttgaacttcattagttgctttaccagttttgtcgtaaacagtagtatataaaccactatttgttggtttgatttgtgcgacaccattgtttgctgcaactgttaatttaccagttgatggtttcgacggtgttgttggttttgatggtgtagtaggggtagttgaagattgcgtaccccatggcgccactttacccatttttattaaatatttttcattaattaagtcatataattgatcataactataattatgacttcttaaatatccatgtggatcggcatggtccgtaccacctaaatatttacttacagcgtagtgagtccatactgtaccatttccatcatactcagcactgtctggttttaaaccataatattgtaattgtgtagctgcatagtcagcatagttattcattgaacgtgcaaatgaagcatagtcgtgtgtgtgtacgatttcaacattgatgaatctagggttaccgactgcaccgacaccccaagataagtaatccgttggtgctgtttcgattatacgatccccatcaacaaatgcatgtacgaatgcgttttgatagttatttttcatataactaatttcaccatttatcgtcgaacgatcattagctgtatcatgaactacgataccttcaggacggccaacaccgttacggtatgcgtatttagggaagtaagatgtgtaatcttcttcgattttaggtgcttttaaattatttttacgaatataatcattaattgatgaatttacctgaggtttatatttaggtaaagacgtctttggtgctgcagcagctgatcttggttgtgctgaagcgctaaaagtagttactttaggtgtcgcttcagttttagctttaggtgctgatgtagttgcagctttaggtgctgcggctttatattgcgtttcaagagctgcaggtttagcagctgatttaattaattctggattaatttgattttctgaattatcatcttcatcatcaactaaactataaccagcatttgtaacattagtgttagttttaggtgctgtagtgcttgttgactttgtaacaggctgcgtattatttgtagtcgctgattgattagcacgagtgtcaccatttacttgtgcagtatcaactttttgacttacttgagcattgcctgttttgttatttgctgtttttggttggacaatagcagggtcttgatatacttgagtgccagaaatgttttgcgttggattttttacctcagcttttgcttgttcagtagttgctttaactttattactatctaaaacgtttttattagtagtttgatcttgtgtcgtctcagctgcttgaacttgatgtgcagtgactgctgaacctacaagcgttaatgcaaccattgatggtagtttgtaattgaattttttcgccattctatttattactcctaacatttattaattattactaacattatagtacctgttttatatacctgtgcgtatttaaccaatttgtaatatactcttaatttacattttcactgtaaaaaaatgaaaaaaattttgaatctcaatggtgacgtgacaaatcaaatagaattgatgtcaatttaagaattggtttattacaaatgtttctaaaatagatacaactttttttaattaagcgaggttaacttttttgtcatttcaatatgctcgatgccttcctcaagaaatatattacctctcattttaaagtttaaactttcataaaatgggatagcatgacattgggcattcatagtagctacgtaaaaaccttcatctttagctaatgattctacagcttgcataagcattctacccattccttgtccacgatgtgatttcatcacagctactcgttctattttgacagttgtttcattaatagggcgtattcgagcagtggcaactggctgtccattatcatatccaatgaggtgaatagattcagattcatattcatcaatttcactttcctcagggacgccttgttcttctacaaacactttctttcttatatagaagcaatcttctaacatcttttgattgtttacttttgaaaacataaaattcctccacatcctaacaaaatcatttacatttaatttactaataataacatagaataacgattgttattttcctcaaaaataattagacataaaaaagctataaagatgtttgttgtgaatcatctttatagctaattaattattaatgttatagtgcttcttttctaataattgctgtatattgccaaaagattcgcatttgagcaatattccaattattcattcccattgtaaatcctgaaggcttaaatatattcacatcagttacttctaaagctgctgcaactaaatattgtaatggaatgctaagtgatttcattgtttcggtaatgccattttcatcatatacccatgaaaatggtaactctgattcgaaaacatcaacactattgaaaatttcaggtagggctaaaatataacatgcaccatctacaataggattgtcgatactatttttgtaataaattaggagtgcttcatagttttctcgatgctcatgattgacgtaaaaaaattcacttctaaaatgagccatatcttggctatgaatgatttgttgttctaacatattaaacatgccatttatatttgcaatcttttcgtatgtttttctactcatgtatgatgctcctttcataaatagtaaatgttaatcgtcatataatattaatttacaacaccattttggttatttgaagcttgtggcgtttgttgaatattaccttgatcttggttagtgttttgacccgtagtaggttgttgctgattattgacaccattgttgttattactattattactgtcgtcagtattattcgaagatttatctttatctgtcgtatcattttgttcttttctcaataaactactatctaaaggcgttaacggtattaatgaaccataatgattaatgacacgttgatctaagaaatcatttttatcattaataggtgataattctaagtctttacgaagtaagtttgcatatttttgaatgctttcaacacttggatgataatagtaaataccatttaacatatcatctttaccttttaattgcgcagttttaatttcaacatcatttgttaagtacatttttgctaaagctttaatttcagagttagttaaattatgctttgcatttttacctacaatttgaatcacgttatcaagtttatcaatagaatcaacttcctgtgctttttggaataaaatcttaattaattccatttgacgttgtccacgttttaagtctgaatcatgatgtctagttctagcaactgctaaagcctcatcaccatttaatttttggtacccttttttaattttaatcttaccagtatcatctgtgttaggttcatttaagtcgtatggcacatcatagtatatgccaccaagctcatttacagcctcgacaaatgctttcatattgactctcacataataatcaacaggtacattcatggtagcttctaccgaatccattgcggcaattggaccaccatatgcatgtgcgtgggtaatcttatcgtaatagccaactttaggaatgtagctgatagtatcacgtggaatactaagcattctaatttgatgttttgattgattaaaagtagttaaaatcatagcgtctgatctagagtgttcagcatcctgtcctttttttcttcttccatcgttatcatcgatacctaagaaaagaatagagataggttgttcttcgggattgactttattatctcttaagttggattgacgattagcatttttgctgtcttgagaagattcgaatgcatcttgggacgttttaaaaagtaacgtagcgaagactattggaacaacaatgagaaccaatgctagaaggatcaaaaagtattttaaaaatttattcatgattgatgctcctatattaaatttttgttaaatcataatcataattttaaaatataattagttgaacgatatttatacaacttcattactaatacattatagccttaaattgtagtactttatagtaaaaaatacaaatgttatgtcaaagttccttgtaatttgaatgttttgttaaaatcaaaaagcatttttaaaaatataatgcgactttagtatgatgtcttaaaaaatttaaaggcgtaatataaattcgagtgatttatacaaagtgataaggtataattaattttgttgtatagataacatattagaaaaacttattactatgtagcgtaaagcataaatgaatgataagttaatttttgtaagttgtattattaggcatctagattcaaatttttaacgatttaaatatataaaatgaatacattgtgaggcaattatcaaatgaaatttaataaagtaaaactagttatacatgcgtgtgtactattatttatcattatttctatagcgttaatttttcatcgattacagacgaagacacattctatagacccaatacataaggaaacaaaattatcagacaatgaaaaatatttagtggatcgtaataaggaaaaggttgcgccgtctaaactaaaagaggtatataatagcaaggatcctaaatataagaaaattgacaagtatttacaaagttcattatttaacggttcagtagctatatatgaaaatggcaaattgaaaatgagtaaaggttatggatatcaagattttgaaaaaggtattaaaaacacaccgaatacgatgtttttaataggttcagctcaaaaattttcaacagggttactgttaaaacagttagaagaagaacataaaataaatatcaatgatccagtaagtaaataccttccatggtttaaaacatctaagcctatcccattgaaagatttaatgttgcatcaaagtggattatataaatataaatcctcaaaagattataaaaatttagatcaagcagttaaagcgattcaaaaacgtggtattgatcctaagaaatacaaaaagcatatgtataacgatgggaattatttagtacttgcgaaagtaattgaagaagttacaggtaaatcttatgctgagaattattatacaaaaataggagatcctttaaaacttcagcacacagcattttatgatgaacaaccttttaaaaaatatctagcaaaaggttatgcttataatagtacaggactttcattcttaagacctaatattttggaccaatactatggtgcaggtaatttatatatgacaccaacagatatgggtaaattaattactcaaatacaacaatataaattattcagtcctaaaataaccaatccattattacatgagtttggtacgaaaaagtatccagatgaatatcgatatggtttctatgctaagccaacattgaatagacttaacgggggattctttggacaagtctttactgtttactataatgataagtatgtagttgtacttgcattaaatgtaaaaggaaacaatgaagttcgaatcaaacatatttataatgatattttaaaacaaaataaaccttacaatacgaagggtgttattgttcaataattaatatagaagatataacatgtatatggcattaaggcatcgaccttatctgaccagtatacgagttatatcttcttttttatagtggtaaaaagtttaaagtataaggttgaagaaggatgagtttaaaaatatgtgttaactgataaaaggggaaatcatttggtgagttggcatcagactaaaatgaatgaagacgaatacgttggtccatgcgtggtgtgaatgttttctaaatctaactggaaatgataatttaataatgtacacttttgattgtttaaacatgtacaatttttaaaaacctagggataattttattgacgtgaacaacattgagattatctttagacataaatatggattttgaagttactatatttattagttgtggttgttaatgtattaattgaattgattataatgattgtcttataagatatagaaggggacttaaccatttaaaaattgaaggaaaataaaaaccagctaacaaaagtgttagctggttaaactttacattattaaaatgttgtttataagtgtgaagagtgaccgccttgcataacccaatatgttccgacaacgaaacaaagtgtaattacaagagcaaagataactttgaatgtttgtaaacgtccatctttaccttcagttaaatgcatgaacattaataattgaagtcctgcttggacgaatgcaaagccaaagataattgtcaacttcgcgtggaatgttaatgacgtgtatagtgttacgtatactgctaaaagcgttaatacgatagatgcgataaatcctacagtatgtttcattattgtactcatccgctatacaccatccctatcatatatacggcagtaaagatgaaaacccaaacaacatctaagaagtgccagtataaacttactataaataattttggcgcattatatttgtctaatccgcgtcgttggatttggattaataaacaaatggcccaaacgatacctagcgatacgtgacaaccatgcgttcctaataggataaagaaactagaccagtaagaaccaattgttgggttaacgccttctgatgcatagtgtgcgaattcataaatttcgaatccaacaaagactaaacctaaaagtaacgtaatgatcatccaaaacatcattaacttttgtttttcttggcgcatgtagtaaatagcaataccacatgtgtaagaactgaataataatgcaaacgtcattattaaaacaagaggcaattcaaataactcagtagtcattttacctgcataatcgccaccatgttgcaaagttaatagtgtcgcaaatagggtaccgaataacgcaaattcggctgtaatgaaaatccaaaagccaagcttatttaattcgccttcatgtgtgcgtgaatcaatagtgtttgtatcatgactcatgacttacagcctccctttctttaatacgcgcttctcttaatctagcttcagtttcagcaacttcagcagcagggatatgatatccgtgatcgatttggaaactgcgataaatcatagtaccaaaaataccgaataaacaaattaatgctggaattacagtttcgaaaattaagaagaaaccgccgatagtcataaagataccaatccagaatccaacaggagtattgtttggcatatgaatgtctttgtaattatggttgtctaagtaatgacgaccatgttctttcatatcaacaaatgtgtcgtagtcattccaatctggtgtaatggcaaagttgtatttaggtggaattgctgatgcagtagtccactctagagtacgaccaaggccatcccagttatctccagttgcttcacgtggagatttgaagtgactgtatacgatactaacaacaaggaataagaatccgattgccattaataatgcaccgatagttgaaattaagtttaataagaaccaaccatctgatggcatataagtgtataaacgacgtggcataccatctaatccaagaatgaattgtggtaagaaacaaacgttaaatccgatcatgaagaaccagaagcaccatttgtttaatgtttcgtttaatttgtaacccatcatctttggataccagaagattaaaccagctaagcaggcaaatacaacaccagtaaccaatgtatagtggaagtgagctactaagaagtacgtattgtgatattgatagtcagctgatgccattgctaacattacacccgtaacaccacctaaaaggaagttagggataaatgctaatgagaatagcattggtgactcaaatgtaatacgtcctttatataatgttaataaccagttaaacaatttcacaccagttggaataccaatcagcattgttgaaattgagaagaatgagttgattaacgcaccattacccattgtgaagaaatggtgaacccaaactaagaaactaaggaacgcgataccggcagttgcccataccatactttgatgtccgaataaacgcttacgagcgaatgtcgggataatttctgagtaaataccaaatgctggaaggataacgatataaacttcagggtgcccccatacccagaagaagttagcccaaagcattggcataccgccatgtgcaactgtgaagaatgctgtgtcaaatattctatcagttgtcattaatgctaacgctactgttaaaggagggaaagcaagaataacaattaatgtagtaataaatgttgttactgtaaacattggcatttgcataaacttcatagttggtgttttacatcttaaaattgttacaaagaagttgatacctgtagctaaggtaccaagccctgaaatttgtatagctattaagtaatagttaacacccggaccaggactgaattcacctgctagtggcgcatagtttgtccaaccagctgctggtgaaccaccaataataaatgacaggttgaataaaatcatacctgcaaagaatagccagaaacttacgttgtttaatactgggaatgcaacatcacgtgctccaatttgtaatggaacaacgatattccataaaccaaagataaatggcattgccatgaagataatcatgattacaccatgtgtactaaaaatttcgttatagtggttagattctaaaaatttgttatcaggtactgttaattgcgcacgaataagtaacgcatcaataccaccacggacgaacattaatacggcacagattaaatacataataccgattttcttatggtctacagatgtgaaccattctttgtaaagatatttccataatttaaagtaagtaattactgcgattaaaccaataactaagaatggggcaccaatttgtgccattgtaatcatccagttacctttaactagtaattgatcccatggaaaattcattaatgtccacctccatgatcatcattgtcttgatcttgcgcatcttttgaaattttcttcatttctttcgcatttttcgattcatctttcttgaactcattgttatatggttcgtcatttccaagaatcatcaacttcataccatgtcgtttatagttcgcatttgtaatttgagctttacgagcaggtattaatggtttgtctgatacatctttaaacatattttcttcactagtgaagtttggatctttcaattcgaaattgaaacgtttatatgcatagaagatgtattctggatcggctgctggatcaacaaacgccatatgtgtaccattaaattctaaagctttattaggtgtgcttggtaataattgtttatcaaatgtatcttgatctaacgttttcttacctttaacttctttcacccatttgtcgtagtctttttgactaacggcatttactttaaatgtttgacgtgagaatccttcaccattgaagttagagttacgacctctgaacgtaccagtttgagatgcttctaacgtccaattcattgtcatgccagtcatggcatatttttgaccacctaattgtggaatccagaaacttgtcattgtatccatagcttgaagcttaaatacaacaggacgatctttagggattgttaatgtattaacagtctctatatgttcatctggataagcaaagaaccatttgtatcctgcacttactgcatatacaaccattggatctttctcactcttcggtggtttttcgtaatcgtataaagttttaactgtaggaatagctaaagcagcaacgattatgataggtattacaaaccatattgtttcaatgatggcattatggtgcatcttaccagattcggcattcttattataactatacttgtaaataaaaatggcgaacatgccaagtacaacgaaacaaataacaagcatgaagacgattgaataaagaatcaagaacttctgactacttgctactggcccttttgcgttgaaaatttctatatttgaacaaccactaagtaaaattagtgtgccaaataatagaagcaaagacttaaattttgacacttttttgacctcctaatactacaaatgtagggcttaacattaattttaagttattacacaatatttacaagggcttatgggaaaaaaattaataaaattgtatcaaaaatgttgataaatcaaggtgtgacgtgggttcacacatttgttaaaattatgtgtacattttgtgactaatagcgtttttgaaaaaattgcttcatatttaaaaggaaagttgagaatagctttcaattaaaggttaattgaatgaaaataaaaaaagtttgaaattgtctaataaattgaaaatgatggctagttcattgaaaggaagcgcaaacattttaataaggaatttgccaaaagtaatttatcgttaaacaatgaaaagtggaaatttgtttgttcaaaatcaaaacatttttttaaaaagagcagttaagttttaataatttgataggtagtcctttggtatacagaaaaaatacaatatttgggttaaagttgcagatgaagttagaataacaaataaaatggtagcaaaacatgttcgtttgctaccattttatttgcagtatagtgatgagggctatttaacctcaatatacctagtggaaattttaattgcaccatctgaatcagtgacatgatatttaatttgatatttaccagatttagatgtatcaatttggccatcgactttaattttatcggttaaatctccatcttctttatcaaatgcacttatgccgtttagaaggttataatcttgacctttcttaataacgatatcattagcgcctttaatttgtggtgtagtattcgtcgttgcatctgcatttaaatttggtgttactagtgtagcagaaacaccgagggctgataatgactgtaatagtttattcataatgtaacctccgaatgataagtcatttctgagttagctttactataccttaatttatattatttacacatcatactatagtcctaatcttaccctataaagaatgaaatttaaatataaatttataaataatgaggaaataattattattttgaaaatctgccacaattgtaaaattaataatttagggataatttgaaatcaaatataactttattcgacagtttgaacttaattttttgtgaatcaaaacaataagaaaagggaggcgaaaatgataaagaaccactaatgattaattatgtagtaatactttatcatagtcacagcttttgtgttggggcctcgccgacttgcattgcctgtagaatttcttttcgaaattctctgtgatggggcccctccccaacttgcacattattgtaagctgacttttcgtcagcttctttgttggggcccataccccaacttgcattgcctgtagaatttcttttcgaaattctctgtgttggggcccctccccaacttgcacattattgtaagctgacttttcgtcagcttctttgttggggcccccaccccaactcgcattgcctgtagaatttcttttcgaaattctctgtgttggggccccggactataattgaaaaatgcttgttacaagcttattttcattcaattaactactgtctatataaaattgttgagccaagaacaaagtgaaatgctcccttcaaagacttcatttattcaatgtctactttgaagggagcatttgatcgattaatgtcccagatttttcttgttattcattgcaattgcaaaataatatttaatgtgggttaaaagacttcattaaaactcagttattagggagtgggacagaaatgatattttcgtaaaatttatttcgtcgtcccaccccggcaaggttgactagaattgaaaaaagcttgttacaagcgaattttcgttcagtcaactactgccattataactttgtagagcatagaacattgatttatgtctcaggctctttacgaatcaatacctcgacgcattttttctgcaagcaaagtattatttaataccatagtaattgttaatggaccaacgccaccaggaactggtgtaatagctccagcaatttctttaaccgcatcataatcaacgtcaccttttaatttgccattttcatctggcgtattgccaacatcgataattactgctccttctttgaccacatcttttgttactaaaccaggcttaccaactgcactgacaatgacatcagcatcctttaaatatgatgccatatcttttgaacgagaatgtaagattgttactgatgcatttttttgaagtagtaacttagaaactggttgtccgacaatatgacttcgtccaattacaactgcatttttaccttctaaatcaatatcagcatgttttaatatttccatgatgccgagcggtgtgcaaggtacaaaagtttgttcatcgatatataatttccctatatttattggatgaaatccgtccacatctttttcaggattgattgcttctaatattttctgttcgctaacttgttttggtaatggtacttgtaccaaaataccacttacagaatcatcattatttagtctatttagttcgtttaatacttcttcttcagtagctgtttcttccaaatgtacgatttctgaaatcataccaattttttcagctgctttcttttttgatctaacataactttgactagcgccatcattaccaactaatataacggataatttaggtgtaaaacccttttcttttagcgcttcaacttgatcttgtaacccctgtctgtagtctttggcaatttgtttaccatctaaaattttagcaaccataaaaacttctcctcctattgtcaatatcctaactttgttagttcataaaaccaatttacatagcaaaagacgtaaattcaaacaaaaaatcaaaataaagttcgatttttgattgaaaaagcagaaattgcttgttatgctatatctataatatacaactaaagtaattcacaattcaaacttttgaaagggtgtacaaagtgaaagtagcagtcattatgggcagttcttccgattggaaaattatgcaagagagttgtaacatgttggattattttgaaattccgtacgaaaaacaagtagtatccgcacatcgtacgccaaaaatgatggttcaatttgcttctgaagcgagagaaagaggtataaacattatcattgcaggcgctggcggtgcggcacatttaccaggtatggttgcatcattaacgacgctaccagttattggagtgccgattgaaacaaaaagtttaaagggtatagattctttattatcaattgttcaaatgccaggaggtattccggttgcaacgactgcaattggtgcagcaggtgctaaaaacgcaggtatacttgcagcaagaatgttaagtattcaaaatccttctttagttgaaaaactaaatcagtatgaatcttcgttaattcaaaaagtggaggacatgcaaaatgaacttcaataaattaaagtttggtgcgactattggcattattggtggtggtcagcttggaaagatgatggcacaatcagctcaaaaaatgggttataaagtggttgtattggatcctgctgaagattgtccatgtagatacgttgcacacgaatttatacaagccaagtatgacgatgaaaaggcactcaatcaattaggacaaaaatgtgatgtgattacttatgaatttgaaaacatttcagcccaacaattaaaactattatgtgaaaagtacaatattccgcaaggttaccaagctatacagttattacaagaccgcttaactgaaaaagaaacattaaaaagtgctggtaccaaagttgtcccgttcatttcagtaaaagaatctacagatattgacaaagcaattgaaacattaggatatccttttattgtaaaaactagatttggtggctacgatggcaaaggtcaagttttaattaacaacgaaaaagacttacaagaaggttttaaattaattgaaactagtgaatgcgtagctgaaaaatatttgaatatcaagaaagaagtatctcttactgttacaagaggaaacaacaatcaaatcacttttttcccattacaagaaaatgagcatagaaatcaaatacttttcaaaacaattgttccagcgagaatagataaaacagctgaggcgaaagagcaagttaataaaattatccaatcgattcatttcattggaacatttacagtggaattttttatagatagtaacaaccaattgtatgtgaacgagattgcaccaaggcctcacaattccggacattattcaattgaagcatgtgattattcacaatttgatactcatattttagcagttaccggacaatcattaccaaattcaattgaattattaaagcctgcagtcatgatgaacttactaggtaaagacttagatttattggaaaatgaatttaatgaacatccagagtggcacttacatatttatggtaagtctgagcgtaaagatagcagaaaaatggggcatatgactgtactaacgaatgatgtaaaccaaactgaacaagatatgtacgctaaatttgaggggagtaattaaagcatgacattattatatgaaggaaaagcgaagcgcattttctcaacaaatcaagaaaatgaattaagagttgaatataaagatgaagttactgctggaaacggggctaagaaagacacaatggcaggtaaggggcgattaaataatcaaattacttctattatatttaaatatttacaagaaaatggaatagaaagtcactttattaaacaattatctgaaacagaacaattagttaagcctgtgaaaataattccattagaagtagttgttcgtaatattgctagtggatctattacaaagcgtttaggttttgaaaatggtgaagtttttagagaaccacttgtggaatttttctataaaaatgatgcgttaaatgatccgttgataacggatgaccatgttaaattgctcaatatagcatcagatgaagatattgaaatactaaaatccaaagcattaaagattaataatgtgttgaaacaattaatggatgctatgaatttaaaattagtagattttaaaatcgaatttggaaagactgagactggtcaaattttgttagcggatgaaatatctccagatacatgtcgaatttgggataaagctaccaatgcaaactttgataaagatgtatatagaaataacactggatcactgattgaaacatatcaaatatttttaaacaaattggaggatttaaaataatgaaaacaattgaactacatatcacattacaaccacaagtattagatacgcaaggacaaacgcttactcgagctgtacatgacttaggttatgcacaagtgaatgatattcgtgtaggaaaagtattatatatgacagtggatgaggttagtgatgaaaaggtacacaacattattacaactctaagtgaaaaattgtttgcaaatacagtgattgaagaatatagctataaagtgttagatgatgaaaaggagaatgcataaaatgaaatttgcggttcttgtttttccaggttcgaattgtgatagagacatgtttaatgctgctattaaaagtggtgttgaagcggaatatgtagattatagagaaacatcactaagtggatttgatggcgtacttattcctggtggattttcattcggggattacttaagatctggggcaatggctagtgtagcgccgattatttcggaagttaaacgtcttgcagcagaaggtaagccagtattaggtgtttgtaatgggtttcaaattttaactgaaataggcttattacctggtgcattattgcataacgattcacatttatttattagtagaaatgaagagttagaaatagtgaataatcaaacggcatttacaaatctttatgaacaaggtgaaaaagttatatatcctgtagctcacggtgaaggtcattattattgtactgatgaaatatatcaacaattaaaagctaacaatcaaattattctgaaatatgtgaataatccgaacggttcatgtgatgatattgcaggaattgttaacgaaaaaggcaatgtatgtggcatgatgccacatcctgaaagagctttagaaacgttgttaggtactgatagtggtgtgaaattatttgaagcgatggtaaaaagttggagggaacaacatgtctaaatttatcgaaccaagcgttgaagaaattaaacttgaaaaagtatatcaagatatgggattaagtgatcaagaatatgaaaaagtttgcgatattttaggcagacaacctaactttacagaaacaggtatcttttctgttatgtggagtgaacattgctcttataaacattctaaaccgtttttaaagcaatttcctacgtcaggtgaccatgtgcttatggggcctggtgaaggtgcaggggtagtcgatataggtgataatcaagccgtagtatttaaagtagagtctcacaatcatccatcagcaattgaaccatatcaaggggctgctacaggcgttggtggaatcattcgtgacattgtctctattggggctagacctattaatttgttaaacagtcttagatttggagaattagataataaacaaaaccaaagattacttaaaggtgttgtaaagggtatcggaggttatggtaactgcattggtattccaacaactgctggtgaaatcgaatttgatgaacgttatgatggcaatccacttgttaatgcaatgtgtgttggtgttatcaatcacgacatgattcaaaaaggcacagcaaaaggtgtaggtaattcggtcatttatgttggtttgaaaactggtcgagatggtattcatggtgctacttttgcatctgaagaattgacggaagaaagcgaaagtaaacgaccttctgtacaaatcggtgatccatttgtaggtaaaaaattaatggaagcaacacttgaagcaattacatttgatgaattagttggtattcaagatatgggtgctgctggtttaacatcttcatcgtctgaaatggcggcaaaaggtggtagtgggttacatttgagattagaacaagtgccaacacgtgagccaggtatttctccttatgaaatgatgctttcagaaactcaagaacgtatgttactagttgttgaaaaaggtactgaacaaaaattcttagatttatttgataagcacgaattggatagtgctgttataggtgaagttacagatacaaatcgttttgttttaacatatgatgacgaagtttatgctgacattccagttgaaccactagctgatgaagcacctgtatatattttagaaggagaagaaaaagattataatacttctaaaaatgattatacacacatcgatgttaaagatactttctttaaattacttaagcatccgactatagcatctaaacactatttatatgatcaatacgaccaacaagttggtgccaatacgataattaagccaggacttcaagcatcggtagtacgtgtggaaggcacaaataaggcaattgcttcaacaattgatggtgaagcgcgttatgtatataacaatccatatgaaggtggaaagatggtagtagctgaagcttatcgaaatttaattgccgtgggtgcaacaccattagcaatgacagattgtttaaattatggttctcctgaaaagaaagaaatctatcaacagttgatagattcaacgaaaggtatggcagaagcatgcgacattcttaagacaccagtagtttctggtaatgtatctttatataacgaaacgaaaggtacttctattttcccaacaccagttgttggaatggtaggtttgattgaaaatgtaaattatttaaatgattttgaacctcaagttggagataaattatatttaatcggtgatactaaggacgactttggtggtagtcaacttgaaaagttaatttatggcaaagttaatcatgaatttgagtcattagatttgagttcagaagttgaaaaaggtgaatcaatcaagaccgctattcgtgaaggactattatcacatgttcaaacagttggtaaaggtggcttactgattaccttagctaaactaagtgcgcattacggtttaggattaaaatcttcaatagatataacaaatgcacaattgtttagtgagacgcaaggccgatatgttgtttctgttaaatcaggtaaaactttaaatattgataatgcaatagaaattggacttttaacagatagtgataatttcaaggtaacaacaccatatacagagattagtgaaaatgtttcagatattaaacaaatatgggaaggggcaattgctcaatgtttaactactcaggattaaacgaagaatgtggcgtgtttggtatttggaatcatcctgaagcagcgcaactaacatatatgggacttcatagtttgcaacatcgtggtcaagaaggtgcaggtatagttgtttctgatcaaaatgaattaaaaggcgagcgaggattaggcttactaactgaagcgattaaagatgatcaaatggaacgattaaaaggatatcaacatgcaattggtcacgtccgttatgctacttcaggtaataaaggtattgaaaatattcaaccgtttctgtatcacttttatgatatgagtgtaggtatttgtcataatggtaacctcattaatgctaaatcattgcgtcagaatttagaaaaacaaggtgctatcttccattcgtcttctgatactgaagtcattatgcatttgatacgtcgaagtaaagctcctacttttgaggaagcgttgaaagaaagtttgcgaaaagttaaaggcggttttacatttgcgattttaactaaagatgcgttatatggcgcagtagatccaaatgctatcagaccacttgttgtaggtaaaatgaaagatgggacatacatccttgcaagtgaaacatgtgcaatagatgtgttaggtgcagaatttgttcaagatattcatgcaggtgaatatgtcgtgattaacgataaaggtattacagttaaatcttatacacatcatacgacaactgcaatttctgcgatggaatatatttattttgctagaccagactcaacaatagctggtaaaaatgtccatgcagtacgtaaagcttctggtaaaaaattagcccaagaaagccctgtaaatgctgatatggtcatcggtgtacccaattcatcgctatcagctgcgagtggttatgctgaagaaataggtttgccatatgaaatgggactagttaaaaatcaatatgttgcaagaacatttattcaaccaactcaagaattacgtgagcaaggtgtgagagtgaagttatctgcggtaaaagatatagtagatgggaaaaatatcattcttgttgatgattccattgttcgcggtacgacaattcgacgcattgtgaaaatgttaaaagattctggtgcaaataaagtacatgtgcgtatagcatcaccggaatttatgttcccaagtttttatggaatcgatgtttcaactacggcagaattaatttctgcaagcaaatcacctgaagaaattaaagattatattggcgctgattcattagcatatctatctgtagatgggttaattgaatcaattggtttagattatgacgcgccatatagtggcttatgtgtagaaagtttcactggagattatcctgcagggttatatgattatgaagcaaattataaagcgcatttaagtcatcgacaaaagcaatatatttctaaaaacaaacacttttttgatagcgagggaaatttaaatgtctaaagcatatgaacaatctggtgtaaatattcatgctggttatgaagctgtagaaagaatgtctagtcatgttaaacgtacgatgcgtaaagaaattatcggtggtttaggtggattcggtgctacatttgatttatcacaattaaatatgacagcgccagttttagtttctggaacagacggagtaggtacgaaattaaaactagctatcgactatgggaaacatgattcgataggtatcgatgcagttgcaatgtgtgttaatgatattttaacgacaggtgcagaaccattgtattttttagattacatcgctacaaataaagttgttcctgaagttattgaacaaattgttaaaggtattagtgatgcatgcgttgaaacgaatactgcacttatcggtggagagactgctgaaatgggtgaaatgtatcacgaaggtgaatatgatgtagccggatttgctgttggagcagttgaaaaggatgactatgtagatggttcagaagtgaaagagggacaagttgttataggacttgcgtcaagtggcattcattcaaatggatacagtttagtgcgcaaattaattaatgaatcaggcattgatttggcatcaaacttcgataatcgtccatttatagatgtctttttagaaccaactaaattatatgtcaaacctgtacttgctttgaaaaaagaagtttctattaaggcaatgaatcatattactggtggaggtttttatgaaaatattccacgtgcattgccagccggatatgctgctagaattgatactacatcatttccaacgccaaaaatatttgattggttacaacaacaaggcaatatagacacaaatgaaatgtataacatttttaacatgggtattggctatacggttatcgttgatgaaaaagatgcatcacgcgctttgaagattttagcagaacaaaatgtggaagcttatcaaattggtcatattgtgaaaaatgagtcaactgcaattgaattgttgggggtataacaatggttaaaattgcgatttttgcatcaggttcaggaagtaactttgaaaatatagttgagcatattgaatcaggaaaacttgaaaatattgaagttacggcgctatatacggatcatcaaaatgcgttttgtatagatagagcaaaaaagcacggtattcctgtttatattaatgaaccaaaacaatttgattcaaaagcagcgtatgaacaacatttagtatcactattaaatgaagataaggtagagtggattattttagctggctacatgcgtctaattggtccagatttattagcttcatttgaaggtaaaatattgaatatacatccatctctattgccgaaatataaggggattgacgcaataggccaagcatatcatagtggcgatactattactggttcgacagtacattatgttgattgtggtatggatacgggagaaattattgaacagagacaatgtgatattagaccggacgattcaaaagaacaattagaagagaaagtaaaaaaattggaatatgagttatatccaagtgttattgctaaaattgtaaaataaggagtatgtatgtgatgaagaaagctattttgagcgtatcaaataaaacaggtattgtagagtttgctaaagcgttaacgcaattaaattatgaattatattcaactggtggtactaaacgtatattagatgaagcaaatgtaccagttcgttctgtttcagacttaacacattttccagaaataatggatggccgtgttaaaacattacatccggctgttcatggtggcattttagctgatcgaaataaaccgcagcatttaaaggaattatcagaacaacatatagatttaattgatatggtagtagttaatttatatccattccaacaaactgttgcaaaccctgatgtaacgatggacgaagcaattgaaaatattgatattggtggtccaacaatgttacgtgctgcagctaaaaactataaacatgtaacaacaattgtacatcctgcagattatcaagaagtattgacgcgattaagaaacggttcgttagatgagtcatatagacagtcattaatgatcaaagtttttgagcatactgcagaatatgatgaagcgattgtacgtttctttaaaggggataaagaaactttaagatatggagaaaatccacaacaatcagcgtattttgtgagaacttcgaatgctaagcacacgattgcaggcgctaaacaattacatgggaaacaattaagctataacaatattaaagatgcagatgctacactagctttagttaaaaagtttgatacacctgctgcagttgcggttaaacacatgaatccatgtggtgttggtatcggtgacacgatagaacaagcatttcaacatgcgtatgaagcggatagtcaatcaatatttggtggaattgttgcattaaaccgagctgtaacacctgagttagcagagcaattgcatagtatctttttggaagtcattattgcaccaaaatttacagatgaagcattagatattttaaaacaaaagaagaatgtaagattattagaaattgatatgactatagacagtaacgaagaagagtttgtttcagtatctggcggatatttagttcaagataaagacaattatgtcgtgccaaaagaagaaatgaaagttgttacagaagtagcacctactgatgaacaatgggaagcaatgttattaggatggaaagttgtaccatcagtaaaaagtaatgcaattattttaagtaataataaacaaactgtaggtataggtgctggacaaatgaatcgtgtcggtgctgctaaaattgcgttagagagagctattgaaatcaatgatcatgtagcgttagtatctgatggatttttccctatgggagatacagttgaacttgcagcacaacatggtataaaggcaattatccaaccgggtggttcgattaaagatcaagattcaattgatatggctaataaacatggtattgcaatggtagtcacaggcactcgacattttaaacactaattttaaaggggcgtaacataaatgaatgtattagtaattggtgctggtggacgagaacatgcacttgcatataaacttaatcaatcgaatctagttaaacaagtgtttgtcattccaggtaatgaggcaatgacacctatagctgaagtacacactgaaatttcagaatctgatcatcaagcgatactagattttgctaaacggcaaaatgttgattgggtagttataggtccagaacagccgctaattgatggattagcagacattttacgagcgaatggtttcaaagtgtttggtccaaataagcaagcagctcaaatcgaaggctcaaaattatttgctaaaaagataatggaaaaatataatattccaactgctgattataaagaagttgagcgaaaaaaggatgctttaacatatattgaaaactgtgaattgcccgttgttgtcaagaaagatgggttagctgctgggaaaggcgttattattgcagatactattgaagcagccagaagtgctattgagattatgtatggtgatgaagaagaaggtactgttgtatttgaaacgtttttagaaggtgaagagttctcgctaatgacatttgttaatggtgatttagcagtacctttcgactgtattgcacaagatcataaacgcgcatttgatcatgatgaaggaccaaatactggtggtatgggggcttattgtccagtaccacatattagtgacgatgttttaaaacttacaaatgaaacaattgcacaacccattgcaaaggcaatgcttaatgaaggttatcaattcttcggtgtattatacattggtgctattttaactaaagatggtccaaaagtaatagaatttaatgcccgttttggtgatcctgaagctcaagtattattaagtcgcatggaaagtgatttaatgcagcatattattgatttagatgaaggaaaacgtactgaattcaaatggaaaaatgaatctattgtaggggtcatgttggcatcaaaaggatatcctgatgcatatgaaaaagggcataaagtaagtggctttgatttaaatgaaaactattttgttagtggattaaagaagcaaggtgatacctttgttacttcaggtggtagagttatacttgccatcggaaaaggtgacaatgtacaagatgcacagcgagacgcatacaaaaaagtatcacaaatacaaagtgaccatttattctatcgtcatgacattgcgaataaagcactacaacttaaataagtaaatttaaaatactaagattagctatgaacgaatctataacgatagattttttcatagcttttttagttgtagagtctaggacattgatttctgtaccaaatttgtgattatgcatatgtaatacaaaagaggcgccacaacatgtttggatgaacaaaataacatgtttgtggcacctcttttgtttagtatggaataaatggttttctttttctatacaatgaatttctaatttagtatctatacaattatggataaaatttaacctacacgaccaagacgaacatcatctatgcccgtgatgggtaaggtgattgaacaataatatgccatagtaataatggcaattaaaactataataaagattatatctttatatgagaaaggtacgttgtaatagtaagtacgaggaccatctctaaatcctttcgactccatcgcaactgataattgatgtgcctttctaatattttggcttaatagaggtataattaaatgcttaaatcgctttaaccctctataatttgccgcgtctatcatctgatagcgcatttttaaagatctgcgaagctgtattaaagaactaatcattaaaggtatcatacgaatggcagccatgaatgcataagcaacttttgatttaacctttaaatgttgcattaaactataaaatatcatgacaacctgagatgtaagtgcgattaagataccgaaaaatgaaatagcaatggttcttaatgatacatgtaaaccacgaactaaactttctgttgtaatatggataaatccgaatttcaaaattgtatggctaccattcccgtataaaatcatgaacagggaagagagtaatgcaaagccaatacttatagttataaaaattgctgtaattttaaactgagtaccattaaacatcaataagaaaactaacattaagatattgatataaagcataaaatcgaaattatgcacaaatataataaagaaaaatagtataattccaagaaatagtttcgttataatgttgacatcatcaacaaatgattgccgaactttccattgctcatacattcgtatcaccatcacaatctagtaacgcaccatctgaaattttaagtcttcttgatggataacgttcaattatttcatcgtcatgtgtaaccatgacaatactttgtcccaaattaattcgcttttggaaaagtttgatcaactggaatgtattatggctatcaagtccaaatgtcggttcatctaaaaagataatatcagctttagaacttagtgcggtagctacgctaaggcgtcgtttttgaccaatagacaactcataaggatgttgatcttttacattttgtaaatctaaaagttttaaaagttgtatcgtttcatcatcactttgatctttagaaaggtgattaaaatgaatgttaatttcatcataaaccgaatttgttataaattgtaattctgggttttgataaactaggtacatgtgttttgctgcatgtttaatttttgttaaacgctgattttcaaaataaacatcaccttgatatttaatcaattgcataattgattcaagcaaggttgttttaccactaccatttgcccctgtaattgtaatccactcacctagaccaatttctaaatctgagaatgagagcaatgttgatttaccgcgaataatacgtccatttttaaattgtaataagtgtgagtttgttgttggaaagtcaacacgacttggtgcgaattcccatgcacgtggatgccacacaccatattcactgagtaaatgaacatacttctgtaatatgatttcaggacattcatcggcaatgatatttccgttataatccatcaaaatgacgcggtcgacatgattccagatgtgtttaactttatgttcaacgattacaaccgtttgatcttcccaaagttcaattagtttagtccataaatcttctgttgcttgaacatctaacattgctgtcggttcatctaaaaacaatgtttttgattgttgaagaatggtttcaacaattgccaatttctgtttcatcccgccacttaaatctttgatatacgtttcaggggtaacatttaaattgaccatatttaaagcattgataattaacgcatccatgtcttcacgtggtaattgtctattttctaaaacgaatgcaagttcttcgtatacttttggcatacaaaactggctatcagggtcttggaaaataacgccacttaatgggtcaacgattagttcatcatatttcataggtaattcaattaaattaggaacaataccacttaatacattcagaagtgtacttttaccgcaaccagaaggaccgagtaaaagtactttttctttgtcttgaatagtgatatttaaatgatcgaaaattttacgttgaccacttggatattttaatcgtaaatcacttacttttaacactctgaatgctcctcttataagttgtcgtaatcttctttagcagctggtctaaataattttgttacgcctgtcttatctaaagcttttactaaaaggtaagataggacgccggcgactactgcaccactaattaatctaaatacgatgaataatgttaagttccaacctgcaacttcatttaaataaccatagaaataatctatcgggaaagccgcgattgctgtacaaaaacctgctaacatagctactataactgaacgtgattgatatttaaaaattgcaaagacaagttcacacgctaaaccttgtataaaagcgtaaacgattgtcggaatatcgaaacgacccataatgatagtttcgccggcacctgcagcaaattcagccagtaaagcaatacctggttttggaataattagatagcagacaatcgctgccatgaaccaaaccccgtttgttaattgttcgaggtgaaggcctgtagcttgcacaccattgtaaacaaaccaccataaattgtaaataactgcgaatactactgaaataagtacggttactagtatttcagatagctttaaaccttttgacatttttacatcctcctaataaaaaaacgcacaaccatccataggaaagttatgcgttcacaatatatattagtaaaacatatgtatagtaacactttcctacgctagttcaagctagatcaggttcaaagggtttgagggcaagcctcatctcagtataaaacacccctagtgtgtgcgatttatttaattaattatactgtaagacgtttgtaaacttatgtcaataggttgtcttcatgaaatttcgtttaattcgatttaaaatttataatattagcattggatttaaattgaagatgtagtaggaatgttagtaattaaagatataaaaatatgtgacatgtaataatattgagctgataaatgaagagggatacttatcaatcatacctctttaacaacagtgaagaacccgtgcataatggcttacgaattatagtttataaggaagaagagggatacatgcgccgagcacatgcaaaaaagcccctaacaactaaaagttgtaaggaagaagagggatacttgcgttgagcgcaagcataaaagcccctaacaactaaaagttgtaaggaaggagagggatacatgcgccgagcacatgcataaaatcccctaacaactaaaagttgtaaggggatttaaattaatttagtgtatcttggatatcttgttttgtttgattaatatcttctgttttttcttcttttttatcttttaatttttcttcaacttctttagctttttctgctgcttttttattttgattttcattagacatgattaattcctcccaaattggataattatttatatataaatcttacccggttgtactttcgttaaacttttctaagtctatagcactatttattcatttatctaaagacaacaacattagattaatatataatgattttgaggtgaacataatgtcttttcttaggaaacacgccgaaattatttttagctatttaatcggtatcgtttcactcttcactggtctcattattttaattaacttgccattaattaaacaattaaatggtggtaaaaaagttgatacacatgttcataatgtgtgggaatttctgaatgcatttttcagtgaaattattaaagtaatgagtcgatttataggtaatttccctatagttagtgcaattgtgataattatattcggtattttagttatgttgattggtcatacattacttagaactattaagtatgactatgatatttctatctttttcttagttatcggtatcatgtactttattattactcttatattaatgactcaagtttatggattctttgcagtgattttcattattccatttacaattcatataggatatatcgtctataaagatgaattgaatcaggaaaatgtaaaaaatcatttcatgtggataattgtgagttatggtataagttacttaattacacaaattgcattgtatggcagaattgatgctaatgaaatagagtcaattgatatcttaagtgtcaatgctttctttataattatgtggttacttggtcaaatggctatttggaatttcttgttcttgcgccgagctttacctttaacaaagcaagaattaggtgaagaggagccagaattatcaagaacaagtaaagggaatgtcacgaatcaaactaaaattcacttgaaacaactccaagataagactacagaatatgcacgtaagacaagaagaagtgtcgatttagataaaattagagctaaaagagataaattcaaaaagaaagttaatgatattatcgatattcaagaagacgatattcctgattggatgagaaaaccgaaatgggttaaaccaatgtatgtcgaactattttgtggtgtcgtcatctttttattcacatttttagaatttaataatcgtaatgcattatttgtatctggtgattggaaattatcacagacacaatatgttattgaatgggttacattattaattctgttattcattattatcgcatatatcgctacaacgttaactttccacttgaaaggtaagttttattatttacaactatttatggggagcattttattctttaaattgttaacggaatttataaatataatgattcatggactattactttcagtgttcattacgccaacattactattaatgttattggcaatcatcatttcttattcgttacaattacgagagcgaccataattaaaagcattataaaagtactatctattaaacattttgatgtgtacgctataagttagatatatctctaacttatttagatacaggtcaatgaagtttatggatagtactttttttgtaactagatttgattgattcaggtgatgtgaattaagtattgaaaattgtatacaaagttttagtgcaaataaaatagttgaaaagttatccatttgtaaaatcaagaaaactagtaaatagttgaagcgacatatggaatttgcgaaacgatatatagtatttcctttgtagaaatttaacatatatcattcgaattactaatttgttaaaatcaacagtaagattagaagtagatgatattgaaatttggcaaacaatttaatctatataaaactacaacgaaacacagaaaggaagttgtcagatgaaaatagcaactctgaacaaaggcaaagaaacaaaatattttaatggatatcctttaattgaagaagaggatatctattcacaagatcatttaaaagaaggagatatttttcaaattgtgactgataaatcacaatatgttgcaacggcttatgttggtcgccaacataaaggattaggttgggttctaacatacgataaagctcaagaaatcaacacagctctctttgtgaaattgtttaatactgcattagcagaacgtgattattattttaatatagatggaacaaatgcttttagattatttaatgctgaaggtgatggtgttgggggattaacaatcgacaattacgatggtcatttgttgattcaatggtactcaaaaggtatttataaatttaaatatgccattcttgaagcggttagaaaagtatttgattataaatctatttacgaaaaagtaagatttaaagacagcgaatatagtggtggttttgttgaaggagatgcacctgagtttccaattgttatcgaagagaacttcacattttataatgtagaccttgaagatggtttgatgacaggtatctttttagatcaaaaagaagtgcgcaagaaattaagggatcaatatgccaaagaacgccatgttttaaacttatttagttatacaggtgctttttctgtaatagcagcaagtgaggcatcttcaacaacaagtgtagatttggctaatcgttctcgtagtttaactgaagaaaattttggattaaatgctattgatcctaaatcccaatatatttatgtcatggacacttttgatttctataaatatgctgcacgacatggacatagttatgacacgatcgtgattgatccacctagctttgcgcgtaacaaaaaacgtacattttcagtgcaaaaagattatgacaaattaattaatggcgccttaaatatcttatcatctgaaggaacattattgttatgtacaaacgcaagtgtatatccattaaagcaatttaaaaatactattaaaaagacgcttgaagagagtggcgttgattatgaattaactgaagttatgggattaccaaaagattttaaaacgcatccacattataagccatctaaatatttaaaagctgtttttgtaaatattagacattaatttgataaaaaggggtatagtaacttattgagaaaaagaagggtgataatattatgggattcaaaaacaatttaacatcaaatttaacaaataaaattggtaattcagtctttaaaatagaaaatgttgacggaaaaggtgcaatgccaacgacgattcaagaattgagagaaagacgacaacgtgctgaagcaattgtaaagagaaaatctttaatgtcatcaacaatgagcgttgttccaattccgggtttagattttggtgttgatttaaaattaatgaaagatattatcgaagatgtaaataaaatatacggattagatcataagcaagttaatagccttggggatgatgtgaaagaaagaattatgtctgcagcagcaattcaaggtagtcaatttattggtaaaagaatttcaagtgcatttttaaaaatagttattagagatgtagctaaacgtactgctgcaaaacaaacaaaatggtttcctgttgtaggacaagctgtgtctgcatctattagttactattttatgaataaaattggaaaagatcacattcaaaaatgcgaaaatgttattaaaaatgtcatgtaggtgctataatagttttgcaatttgcaaattttactgaaaccggttttaaacgaattgaatttaaagcatggttttggtaaagttaatgtataaaactaagttagtattgtaataatattgaagattctaactatacgaaggagaaatgtaattatggaacaaaattcatatgtaatcatcgacgagactggtattcacgctagaccagcaacaatgttagtacaaacagcttcaaaattcgattctgatattcaattagaatataacggtaagaaagtaaacttaaaatcaatcatgggtgttatgagccttggtgttggtaaagatgctgaaattacaatttatgctgacggtagtgatgaatctgacgccattcaagcaatcagtgacgtcttatcaaaagaaggattgactaaataatcatgtctaaattaattaaaggtattgccgcatctgatggtgtcgcaattgctaaagcttatttattagttgagccagacttaacattcgacaaaaatgaaaaagtcactgatgttgaaggagaagttgcaaagttcaatagcgctatcgaagcttctaaagttgagttaactaaaattagaaataatgcagaggttcaactaggtgctgataaagctgctatctttgatgcacatttattagttttagatgaccctgaattaattcaaccaatccaagataagattaaaaatgaaaacgctaatgctgctacagcattaacggatgtaacaacacaatttgttacaatttttgaatctatggataacgaatacatgaaagaacgtgcggctgatattcgcgacgtttctaaacgtgtgttatcacatattttaggtgtagaattaccgaatccgagtatgattgatgaaagcgttgttattgtagggaatgacttaacgccatctgatactgctcaattaaataaagaattcgtacaaggttttgctacaaacattggcggaagaacaagtcactctgcaattatgagtcgttctttagaaattccagcaattgttggtacaaaatcaattactcaagaagttaaacaaggcgacatgattatcgtagatggattaaatggtgatgtaatcgttaatccaactgaagatgagttaatcgcttatcaagataaacgtgagcgttattttgctgacaagaaagaattacaaaaactacgtgatgctgatactgttacagttgatggtgttcacgcagagcttgctgcaaatattggtacacctaatgatttgccaggtgttattgaaaatggtgcacaaggtatcggcttatatagaactgagtttttatatatgggtcgtgaccaaatgcctacagaagaagaacaatttgaagcttataaagaagtattagaagcaatgggcggtaaacgtgttgttgtacgtactttagatataggtggagataaagaattatcatacttaaacttgcctgaagaaatgaatccattcttaggttaccgtgcgattcgtttatgccttgcgcaacaagatattttcagaccacagctacgtgcattattacgtgcatcagtttatggtaagttaaatatcatgttcccaatggttgcaacaattaacgaatttagagaagctaaagctatattattagaagaaaaagaaaaccttaaaaatgaaggtcatgacatttcggatgatatagaattaggaatcatggtagagatacctgcaacagcagcattagctgatgtctttgctaaagaagtagatttcttcagtatcggtacaaatgatttaattcaatacacattagctgctgaccgtatgtcagagcgtgtatcatatctataccaaccatataacccttcaatcttacgtttagttaaacaagttattgaagcgtcacataaagaaggtaaatggacaggtatgtgtggtgaaatggctggagatgaaacagctattccattattgcttggtttaggtttagatgagttctctatgagtgcaacgtctattctgaaagcaagaagacaaattaatggtttaagtaaaaatgaaatgactgaacttgctaaccgtgcagtcgactgtgcaacgcaagaagaagttattgaattagttaacaactacgtaaaataattaattctttcgaaagacagaattataaataaacccgaagtattcattgtgagtaattatgaatacttcgggttcttttttatgatttatgttaatttcaatggaatgttgttgctaactaattaaacaactatgtgtcattaacaaaatgttgttctttaattaatgttagttaatttaaaaatcgatatttaatttatgatagctataaatgatgaagttgatttagatgaaaattaatcttggatatttaatactttgttgatttcatcaagatcaacatggtacattggattgccattcaacaaaataaacggagttgaaaaagcatcaaaatctatcatttcgtttcgatattgttgattgttgatatttctctcttcaaaatcaatgtgatgctcatttagataattttttacaaatgtacaaggtggacaatcattctgcgtataaacgattatttctgacatatatcatgctccttcgtgctttattctaatgtaatatacacaattatacattgaaattcaaatttgtgaacacattgtgaactgacataaattatacacaatttcatagcgcataatgttttaaaaatacacattatagcaattataattaagttcattgtgttgtcatcaaaaaaagaaaaaggtgatgtttttaaatggatacagttgaaatcagtcggtttttgacagctatgactttagcagttcatatcatttttgcaacgattggtgttggtatgcctttaatgttcgcaattgcagaatttttaggtattcgcaaaaatgatcttcaatatatagctatggccaaaagatgggctaaagcttatacaattactgtagcagtgggagttgttacaggtacaattataggacttcaattatcattgatttggcctacatttatggaaatgggtggacacgttattgcacttccattatttatggaaacatttgcgttcttctttgaagctattttcttaagtatatatttatatacttgggatcgttttaaaaataaatggacacatttcttaattagtataccagtaattattggtggctctttctcagcattcttcattacttcagtgaattcatttatgaatacgcctgcaggttttgagttgaagaatggaaagatggtcaatgttcaacctatagaagcgatgtttaacccatcgtttatagttcgatcatttcacgtaattactacagccggtatgacgatggcatttgttattgcatcaatagcagcttttaaattattgcgtaatcgtcaacctaaagatactgtctaccataagaaagctttgaaaatgtctatgatagttggattcttttcaacattactttctatgttggcaggggatttatctgcaaaatttttgcataaattccaacctgaaaaattagcagcttatgaatggcatttcgatacatcttcccatgccaaattattattatttggtgtgttagatgaaaagactcagcaagttaaaggtgcgattgaattacctggactattgagtttcttagcagataatagtgtcaaaactaaagtacaagggttaaatgattttccaaaaagtttacatccgcctatgatcgtccattatttctttgatttaatggtaacgatgggaattttatgttttgtcatttcaggtgtttatgtcttaactttaatgtttaaaaagcttagaaagttttctactcataaatggatgctttatggaatattattaacaggcccagcttcaatgctagctatagaatttggatggttcttaacagagatgggtagacagccttggattgttcgtggttatatgcgcgtggcagaagcagcaacacaagcaggcggaataaccttcgttacaattttatttggcatattgtacatcattttaatgtatacatgtgcatacgtattaattcgtatgtttaaaaataaaccggcgtatgaagatgtaaatcgtttagccaagaagcaaggaggagaaatagaaaaatgatttatgcatttataggtataacagtgttatggttgtttttattttgctatatcattattgcttctatagattttggggcaggtttcttcgcattgcattcaaagttaactggtgatgaaaagaaaattaatcacttaatttcacgttatttaaacccagtttgggaagttacgaatgtattctttgttttcttcttcgtaggattcgtaggtttctttccagagtcaatcaaatatttaggcacggtattgttaataccaggttcaatagcactgattatgatatcgttgagaaacagtttttatgcatttgaaaattatggtcaagatacaaaattagcatggatgatcatgtatggggtaagtggattattaattccagcttcattatctactgctttaactattacagaaggtggctatattaatgttcgaaacaatgttatcgatctagattgggtgcagttattattaagcccatttgcttggtctgtagtattcttggcaattatttcagttttatatatttcatcaggatttttgacatattatgctaaaaaagcaaatgacgaaccagcatataatttaacaagacaatggcacatatttttagggccgccgatgattatcatttgtttattcgtatttctatcattacgcattcaaaattctgaacatttttattcagctgtttttgactattggtggatgtttggtataagtttcttattctttgcattagcttcattgttaacattctttaagaaaaaacatggtttggcttttgtatttgttattttacaaatgatgttcgcgttctttggctatggaattagtaaattgccataccttttatatccgtttgtaaaaattacagatgcatatgttaatccagaaatgggctggacattagtgattgtctttattttaggtttacttttattacttccatcgttaatattattattaagattatttgttttcgacaaagaatatgttgaaggaaagaaatcataagttgagacgataccccaactttcatttacttgcattactgcatttagataatttagttggggtactcatttataataattttaaatttatattttcaatgaattgatgaaaatcatttaatggagggcgagtatgggtaaagaatatgtagtcatcggtctaggtcgttttggaggtagtatcgttcgtgagttgaatgcattagacatggatgtaatggccatcgaccatgatgaaaatagagtgaatgaatatagtgatatcgctactcatgcggttgttgcagacactacagatgaagcagttatgaaaagtttaggtatccgtaactttgatcatgtcattgtggcaattggtgaaaatattcaatcaagtacgttgacgactttaattttaaaagagttaggtgtaaaaaaagtaactgctaaagcacaaaatgattatcatgcaaagattttaaataaaattggagcagatacggttgtgcaccctgagcgtgatatgggtagacgtattgcgcataatgttgcgagtgcaagtgtacttgattatcttgagttggcagacgagcattctattgtagaattgaaagcaactgaaaagatggcggggcagtctatcattgatttagatataagagcacaatatggaattaacattattgcaattaaacgaggcaaagagttcatcatatcaccaaatccaaatattaatttagaaataggtgatattttaatcatgattggacatgataatgatttaaatcgctttgaaaaaaatattgcgacgagataatcgggagtgggacagaaatgatattttctcaaaatttatttcgtcgtcccaccccaactcgcattgcctgtagaatttcttttcgaaattctctatgttggggcccctgactagaattgaaaaaagcttgttacaagcgcattttcgttcagtcaactactgccaatataactttgtagagcattgaacattgatttatgtctcaagctcatcatatataaagaaaaagctactaacaatgggtggtgagtttaattaaaacttcacttcaaagttagtagctttttgattatttattgtttgattctttttgttcgtttaccttcataatgactggtaaaatcattggttttctagctgttttttcaaataaataaggttgtaatgtttcaatgatagaagatttaatctgatgccattgaatatctttattttgatttaacttactaataacatcagttttgattttgcgttgtgcatcataaattaattgacctgattccctcatatatacaaatcctcgagaaataatgtctggaccagaaagtaatttatttgtattaaaatcaatactaacaacaacgataactaaaccttcttcagataatagcttacggtctcttattacaacattaccgatatcaccgataccactaccatcaacaagtacattaccagatggaatgcgaccagctttacgtgctgaatcgtgtgttaaagctaagacatctccaatatcaaagatgaagacattatcttcttcaacgccgcattcaacaccagtctcaccatgtgcttttaacatacggtattcaccatgaataggtaagaaatatttcggcttgattaatcgaagcattaattgttgatcaccttgagaaccatgccctgaagtatggatgttagaaatcttgctatggataacatctgcaccagctttatacaaggaattaatagttctgttaatactttttgtattacctgggataggtgatgaactaaatacaacggtatcttcaggtataattttaatttgcttatgagtaccattagcaattctagataatgctgccattggttcaccttgtgaaccagtacatagtatcaataactcatgcttcggtacggtattaattttattaggttcaataaatgtttcaggtggtgctttaatataaccaagttccatacctattttaatattgttttccatcgaacgaccgaacgtaacaattttacggttatttttgatagcagcttcaactgcttgttgaactcggtaaatattagaagcgaaggtagcaaatataatacgacctttacaattacggaagatcttatctacgttttgaccaacttcacgttcgcttaaagtaaaatcaggcacaagtgaatttgttgagtctgaaagtaaacatagaacgccttcttcgcctaattgagccattttagcaatgtttgctggtttgcctacaggtgtaaaatcaaatttaaagtcaccggtatgaactacttttccttcaggtgtatctacgatgacgccataagtttcaggaatactatgcgtagttaagtagaaagaaatcgtaaagtgcttagatttaatcacactgtcctcattgatttcatttagtttagcagtacgtaataaatgatgttcttcaagtttattacggattaaacctaatgctaaaggaccaccataaataggtatattaagttgttttaataggaagggcacaccgcctatatggtcttcgtgaccatgtgttataaataggccaacaattttatcttggttttgaactagatatgtgtagtcaggtataacataatcaatccctaataagttatcatcagggaatttgatacctgcatcgataatgacaatttcgtctttatactcaactgcataagtatttttaccgatttcacctagacctccaagtgcatatacacctacttcatttggatgtaattgtttcattatttagcaatctccacattaaagtgttctgagttttctttttcgtaatctaaatgtgcgccctctaatttagtgataaattcgatattaaaattacgatctttcaagtaacgacgtacttgttcttctgtttgagcttcaacataaagtgattgtgtattttcacgcacaattacctcgtctctgttatgttgataaaaaactttaaatactgccatgttaaaaattcctcctaagaatgtttgtttaatttattgttaaccctagtaaaatcgtattggagtatatatcgataaattcattccaattatctctataatttaacttaataacgatttggttaataactaggttcatcatgtcgttcattttaaaaaattagtgaaataacactaaaatttcagttaaatcttattttacatgatgaatgataataaataaagcagtttatctcactagaaatctaagtatttcgaataaatgtgcagttctatttattaaaataaatgtagagattataaattaatgttaagaaagaattaaaggattttatatgaaacggtaaaatttaaatgaggggataaaaagtttggtagaaaggtgaatatatttaactgttgtttattcgaaaaagttgtacaagaaaaagcttaggacatcatatttatcctaagctttgataattagtaatagtgtgttttaaacttctactgcatctgtatgtggttgtaatgggtggtctttgtcaatgtgatcatagaacattacaccatttaaatgatcaatttcatgttggaaaacaattgctggatatccttttagtcgtaattgtatatcattaccttcgatgtctttggctttaattgtaattctattatgacggtgaactagaccagcaacattatcatcgacactaaggcaaccttcaccagttggtaaataagcttcttgaacgctatgacttacaatttttgggttcacaagcatatagtcataagatttgccactgccatcatctggtattaaaacagcaatcatacgtttagaaatattaatttgaggtgcagccaaaccaacgcctgaacgtaaaccatatcgtttcgcgatttcctcatcttgactatttactaaaaactctctcatggcgattaatgtttctttttcttctttagttaatggtaattctaactcagctgctttttgacgcaaagttggatgaccatctctaatgatgtctttcattgttaacatatattgcaccttccttattttaatttgttttagttgaatgacagtaaaaaggttgttaagatactcatacatttttatgtgtaaatatctacaaagttaaccaactactgccaatgtttattttagatagtatatgtaaattttcagatatgctaattgcttaaaaaatgattaaagtgttggtttcaagcaatgatactttagaaatttatttatcatcttgactttaaaaattatattataaatgacgtaactgtcaacagatatacttagtaatgaagatgtgtaatgtaattgtttaaaattgatttccaagcagattttatttatcatttaatttaaatagcaagtggaggtacaagtaatgaaatttggaaaaacaatcgcagtagtattagcatctagtgtcttgcttgcaggatgtactacggataaaaaagaaattaaggcatatttaaagcaagtggataaaattaaagacgatgaagaaccaattaaaactgttggtaagaaaattgctgaattagatgagaaaaagaaaaaattaactgaagatgtcaatagtaaagatacagcagttcgcggtaaagcagtaaaggatttaattaaaaatgccgatgatcgtctaaaggaatttgaaaaagaagaagacgcaattaagaagtctgaacaagactttaagaaagcaaaaagtcacgttgataacattgataatgatgttaaacgtaaagaagtaaaacaattagatgatgtattaaaagaaaaatataagttacacagtgattacgcgaaagcatataaaaaggctgtaaactcagagaaaacattatttaaatatttaaatcaaaatgacgcgacacaacaaggtgttaacgaaaaatcaaaagcaatagaacagaactataaaaagttaaaagaagtatcagataagtatacaaaagtactaaataaggttggtaaagaaaagcaagacgttgatcaatttaaataattaatataatacagatggtaggaaacaactaatacagttcctattatctgtatctttttttattaaaacagaactttttcaaatggtttaacagtcccatttatttgtggtacaattagtaaggataaaatgaatttctatacaattatgggaaaggtatggtgaattgaatggctcctaagttacaagcccaattcgatgcagtaaaagttttaaatgatactcaatcgaaatttgaaatggttcaaattttggatgagaatggtaacgtcgtaaatgaagacttagtacctgatcttacggatgaacaattagtggaattaatggaaagaatggtatggactcgtatccttgatcaacgttctatctcattaaacagacaaggacgtttaggtttctatgcaccaactgctggtcaagaagcatcacaattagcgtcacaatacgctttagaaaaagaagattacattttaccgggatacagagatgttcctcaaattatttggcatggtttaccattaactgaagctttcttattctcaagaggtcacttcaaaggaaatcaattccctgaaggcgttaatgcattaagcccacaaattattattggtgcacaatacattcaagctgctggtgttgcatttgcacttaaaaaacgtggtaaaaatgcagttgcaatcacttacactggtgacggtggttcttcacaaggtgatttctacgaaggtattaactttgcagcagcttataaagcacctgcaattttcgttattcaaaacaataactatgcaatttcaacaccaagaagcaagcaaactgctgctgaaacattagctcaaaaagcaattgctgtaggtattcctggtatccaagttgatggtatggatgcgttagctgtatatcaagcaactaaagaagcacgtgaccgcgcagttgcaggtgaaggtccaacattaattgaaactatgacatatcgttatggtcctcatacaatggctggtgacgatccaactcgttatagaacttcagacgaagatgctgaatgggagaaaaaagacccattagtacgtttccgtaaattccttgaaaacaaaggtttatggaatgaagacaaagaaaatgaagttattgaacgtgcaaaagctgatattaaagcagcaattaaagaggctgataacactgaaaaacaaactgttacttctctaatggaaattatgtatgaagatatgcctcaaaacttagcagaacaatatgaaatttacaaagagaaggagtcgaagtaagccatggcacaaatgacaatggttcaagcgattaatgatgcgcttaaaactgaacttaaaaatgaccaagatgttttaatttttggtgaagacgttggtgttaacggcggtgttttccgtgttactgaaggactacaaaaagaatttggtgaagatagagtattcgatacacctttagctgaatcaggtattggtggtttagcgatgggtcttgcagttgaaggattccgtccggttatggaagtacaattcttaggtttcgtattcgaagtatttgatgcgattgctggacaaattgcacgtactcgtttccgttcaggcggtactaaaactgcacctgtaacaattcgtagcccatttggtggtggcgtacacacaccagaattacacgcagataacttagaaggtattttagctcaatctccaggtctaaaggttgttattccttcaggcccatacgatgcgaaaggtttattaatttcttctattagaagtaatgacccagtcgtatacttagagcatatgaaattgtatcgttcattccgtgaagaagtacctgaagaagaatatacaattgacattggtaaggctaatgtgaaaaaagaaggtaatgacatttcaatcatcacatacggtgcaatggttcaagaatcaatgaaagctgcagaagaacttgaaaaagatggttattctgttgaagtaattgacttacgtactgttcaaccaatcgatgttgacacaattgtagcttcagttgaaaaaactggtcgtgcagttgtagttcaagaagcacaacgtcaagctggtgttggtgcagcagttgtagctgaattaagtgaacgtgcaatcctttcattagaagcacctattggaagagttgcagcagcagatacaatttatccattcactcaagctgaaaatgtttggttaccaaacaaaaatgacatcatcgaaaaagcaaaagaaactttagaattttaatacattttaaaagttaacgaagttagcgtattttagtctcattgattaaaatgaaatgtttaatttacgaaatcttaggagggcaaaaacgtggcatttgaatttagattacccgatatcggggaaggtatccacgaaggtgaaattgtaaaatggtttgttaaagctggagatactattgaagaagacgatgttttagctgaggtacaaaacgataaatcagtagtagaaatcccatcaccagtatctggtactgtagaagaagttatggtagaagaaggtacagtagctgtagttggtgacgttattgttaaaatcgatgcacctgatgcagaagatatgcaatttaaaggtcatgatgatgattcatcatctaaagaagaacctgcgaaagaggaagcgccagcagagcaagcacctgtagctactcaaactgaagaagtagatgaaaacagaactgttaaagcaatgccttcagtacgtaaatacgcacgtgaaaaaggtgttaacattaaagcagtttctggatctggtaaaaatggtcgtattacaaaagaagatgtagatgcatacttaaatggtggtgcaccaacagcttcaaatgaatcagctgcttcagctacaagtgaagaagttgctgaaactcctgcagcacctgcagcagtaacattagaaggcgacttcccagaaacaactgaaaaaatccctgctatgcgtagagcaattgcgaaagcaatggttaactctaagcatactgcacctcatgtaacattaatggatgaaattgatgttcaagcattatgggatcaccgtaagaaatttaaagaaatcgcagctgaacaaggtactaagttaacattcttaccttatgttgttaaagcacttgtttctgcattgaaaaaatacccagcacttaacacttcattcaatgaagaagctggtgaaatcgttcataaacattactggaatatcggtattgcagcagacactgatagaggattattagtacctgttgttaaacatgctgatcgtaagtctattttccaaatttcagatgaaattaatgaattagctgttaaagcacgtgatggtaaattaacagccgatgaaatgaaaggtgctacatgcacaatcagtaatatcggttcagctggtggacaatggttcactccagttatcaatcacccagaagtagcaatcttaggaattggccgtattgctcaaaaacctatcgttaaagatggagaaattgttgcagcaccagtattagcattatcattaagctttgaccacagacaaattgatggtgcaactggccaaaatgcaatgaatcacattaaacgtttattaaataatccagaattattattaatggaggggtaaaacatggtagttggagatttcccaattgaaacagatactatagtaatcggagcaggtcctggtggatacgttgcagcaattcgtgcagctcaattaggacaaaaagtaacaattgttgagaaaggtaatcttggtggtgtttgcttaaacgtaggatgtattccttcaaaagcattactacatgcttctcaccgttttgttgaagcacaacattctgaaaacttaggtgttattgctgaaagtgtttctttaaacttccaaaaagttcaagaattcaaatcatcagttgttaataaattaactggtggtgttgaaggcttacttaaaggtaacaaagttaacatcgttaaaggtgaagcatatttcgtagataacaatagcttacgtgttatggacgaaaagagcgcacaaacatacaactttaaaaatgcaatcattgcaacaggttcaagaccaattgaaattcctaatttcaaattcggtaaacgtgttatcgactcaacaggtgctttaaacttacaagaagtaccaggtaaattagttgtagttggtggaggatacattggatcagaattaggtacagcatttgctaactttggttcagaagtaaccatccttgaaggtgctaaagatatcttaggtggcttcgaaaaacaaatgacacaacctgttaaaaaaggtatgaaagaaaaaggtgttgaaatcgttactgaagctatggctaaatcagctgaagaaacagataacggagttaaagttacttatgaagctaaaggcgaagagaaaacaatcgaagctgattatgtattagtaactgtaggtcgtcgtccaaacacagacgaattaggcctagaagaattaggtgttaaattcgctgaccgtggattattagaagttgataaacaaagccgtacgtctatcagcaatatctatgcaattggtgatatcgttccaggtttaccacttgctcacaaagctagctatgaagctaaagttgctgctgaagcaattgatggtcaagctgctgaagttgattacattggtatgccagcagtatgctttactgaaccagaattagctacagttggttattcagaagcgcaagctaaagaagaaggtttagcaattaaagcttctaaattcccatatgcagcaaatggtcgtgcattatcattagatgatactaacggatttgttaaacttattacacttaaagaagatgatactttaatcggtgctcaagtagttggtactggtgcatcagatattatctctgaattaggtttagcaattgaagctggtatgaatgctgaagatatcgcattaacaatccatgcacatccaacattaggtgagatgactatggaagcagcagaaaaagctatcggatacccaatccatacaatgtaataactgattatctataaagattcagtcattaaaagctgtagcatatgctacggcttttttgttttaggtaaagtaatgtaaggaaattgatttgagatatcgttaacatgtgacatgcatgttatactagcgatgctaacaaaagaattgaaatggagggttcaacaatggaatatgagtatccaattgatttagactggagtaatgaagagatgatttcagtgataaatttctttaatcatgtagagaagtattatgaatccggcgtgacggcaggcgactttatgggtgcatataaaagatttaaagaaattgtgcctgctaaagcagaggaaaaacaaatttttaatactttcgaaaaaagtagtggctataatagttacaaagcagttcaagatgtaaaaactcactctgaagaacaaagagtaacagctaaaaaataattcgttcgaaattaacacaatttaataggaatttttctttaaaactattgctaataaagctatattttgatacctttatcaagtgttaaacaaaatgtttgataaaagtaaacttaatatagcttttttaggtggaaaaataaatgaacataggtaataaaattaaaaatcttagaagaattaaaaatttaacgcaagaagaacttgctgaacgtacagacttatcgaaaggctacatttcacaaatagaaagtgaacatgcctcaccaagtatggaaactttcttaaatattatagaggtgttaggaacgacgccaagtgaattttttaaagacagtgaaaatgaaaaagtattatacaagaaggaagaacaagttatttatgatgagtatgatgaaggttatatattaaattggttagtttcaaagtcaaatgaatatgatatggagccattaatattaactttaaagcctggagcatcatataaaaattttaatccatcagagtctgatacgtttatttattgtatgtcaggtcagataacacttaatttaggcaaagagatatatcaagcacaagaagaagacgttttgtattttaaagcacgagataatcatcgtttgtcaaacgaatcaaacaatgaaacacgaatacttattgtagcgacagcttcatatttataggggggatcttatttggaaccgttattatcattaaaatcagttagtaaaagctatgatgatcttaatatcttagatgacatagatattgatattgaatcaggatacttttatacattattaggtccttcaggttgtggtaaaacaacaattttaaaattaattgcagggtttgaatatcctgacagtggtgaagtgatttatcaaaacaaaccaattggtaatttaccaccaaataaacgtaaagtgaatacagtctttcaagattatgcattatttccacacttaaacgtctatgataatatcgcttttggtttgaaattaaaaaaattatcaaaaaccgaaattgatcaaaaagtaactgaggcattaaaattagtaaaactttcaggttatgaaaaaagaaatattaatgaaatgagtggcggacaaaagcaacgtgttgcaattgcacgtgctatcgtaaatgaaccagaaatattattgttagatgaatctttatccgcattagatttgaaattgcgtactgaaatgcaatatgaattacgagaattgcaatctagattaggtattacatttatatttgtaacacatgatcaagaagaagcgttagcattaagtgactttctttttgtattaaaagatgggaaaattcaacaatttggcacaccaacagatatatatgacgaaccagtgaatcgatttgtagctgattttattggagaatctaatattgttgaagggcgcatggttagagattatgtcgtgaatatttatgggcaagatttcgaatgtgtcgatatgggtattcctgaaaataaaaaagtagaagtcgttattcgaccagaagatatatcattaatcaaagctgaagaaggattatttaaagcaactgttgattctatgttatttagaggggtccactatgaaatatgttgtatagacaataaaggttatgaatgggtaatacaaacgactaaaaaagctgaagtaggcagtgaagttggtctttattttgatcctgaagccattcatattatggttcctggagaaacagaagaagaatttgataaacgtattgaaagctatgaggaagtagacaatgcgtaatactaataaatttctcttaatcccgtatttactatggatggttatatttattattgtaccagttgtattactcatttatttttcatttttagatatcaatggacattttagtttcacgaattatcaacaaatttttactacaaaatatttgaaaatgtttgcatattcaattttatatgccgcttcaataacaattattaccttgactatcagttatccagctgcctactatattactcgttcgaaatttcaaaatatcttattaatgataatgattattccaacatggataaatttattgttaaagacatatgcttttataggtttattaagtcatgatggcgtgattaatcaatttttccacttatttaatttaccatcattcaatttgttatttacaactggtgcgtttttagtagtggcaagttacatttatataccatttatgattttacctatatttaatagcatgaaagcaattcctaataatttattgcaggcctcaagtgatttaggtgccagtcctttctatacttttagaaaagtaatcatgccgttaacaaaagaaggtgttatgactgggattcaagtaacctttattccatcactttcattatttatgattacaagattaattgcaggtaataaagtcataaatataggtacggcaatagaggaacaatttttaacaattcaaaattatggtatgggatcaactatagctatattcttaattgtatttatggcattcattttaatcattacaaaatcatctaatgggagagggtgaatcatatgaaatggtatggaaagctgtatatcgggatacttttagcgattttatacatcccaatattctttttaatgttctattcattcaattcggctggtaatatgattcactttgaacattttacattagagcattatcaatcattatttcaaaatgatcatttaatgtcggtcatttttaatacgatagctgtagcacttttagcagcctcaatttctacagttattggtacatttggtgccattgctatttattatttaagaaataaaaagtttaaagtaactttactaacattgaataatgtcttgatggtatcatccgacgttgtcataggtgcatcattcttaattatgtttacaacgattggccattttactggtcttggtttaggattttggacagttctaatatctcatattgcattttgcatacctatagttgtgattatcgtcttaccacaactgtatgaaatgaataataatatgttaaatgctgcaagagatttaggagcgactgaaccacaattattaagcaacattattattcctaatattttaccttctattataggaggattctttatggctttaacttattcactagacgatttcacagtaagtttcttcgttactggtaatggctttagtgtgttatcagttgaagtttatgctatggcgagaaaaggaattagtatggaaattaatgcgatttcaacattattgtttgctgttattgtattaggaatactaggatattatttgattcaatacgtgataaataagaaaaaactaatcaagcgaggtgtaaaataatgaaacgttttttacaactcattataggtgcattagttgtgggtatgctttgtcttactttaagtcattggtttaaatctaaagaacaagtgcatacaaatcaaaaaatttacgtatacaattggggcgaatatattgatccagagttaattaagaaatttgaaaaagaaactggcattcaagtcgtttatgaaactttcgattcaaatgaagcgatggaagccaaaattcgcaatggcggtacacattatgatgttgcttttcctagtgaatatacagttcaaaaattgaaaagagatcatatattgttaccaatagatcataataaggtacctaatattaaaaatttagattcagattatatgaatatgtcatttgataaaggcaataaatattctttaccttatttctttggaactgtaggtattttatataataaagaaaagtatccaaatgaatcatttgatagttggaagtcattgtataatcctaaatttaaaaaccaaattttactagttgacggtgctagagagattataggcatgagtttgaataaacttgggtataatcttaatgaccgtaattcgcaccatttaaaagaagcagagcgagatttaaccaaactagcaccacaagtaagaggtgtcgtaggtgatgaaattaccatgatgcttcaacaaaatgaaggtaacatagcggttgtttggagtggtgttgcagcacctctagtgcaagaaggggataaatataattatgttattcctaaagaaggatcgaatttatggttcgacaatatggtaattccaaaaacggcacaaaataaagagggtgcatataaatttatgaattttttattagatgctaaaaataacaagcaaaatacagaattcgtaggctatgcaacgccaaacaaggctgctcgacaattgttgcctaaagagattaaagacgaccatcgtttttatccgactaagaaagagcaagaacgccttgaagtttataaagatttaggacctgaagttttaagtgaatacaatgaaaactttttgaatttcaaaatgtcattaaaataaaatcataaatagtagttatttactgtatatttagttataataacgggataagtactataaggagttgtaacgaatgactggagaacaatttactcaaattaaacgtccagtaagtagattaactgaaaaagttctaggttggttatgttgggtgatgttattagtgcttactgtaattacgatgtttatagcacttgtttcattcagtaataacacatcgattgctaatcttgaaaatacattaaacaataatgcatttatccagcaattattagctggaaatggctataatacaacacaatttgtaatatggttacaaaatggtatatgggctattatcgtttactttattgtttgtttgttgatttcatttttagctctcatatctatgaatataagaatcttgtcaggtttcttattcttaatatcagcaattgtaacgattcctttagttttacttatcgttactttaatcattccgatattattctttattattgcgatgatgctatttataagaaaagataaagttgaaatggttgcgccacaatattatgaagagtataacggaccgatttatgattatcgtgaacctgtgtatgagcgcccccaaccgaaagatgattattatgatgtgcctaaatatgaaaaagaattggataaatcaaatactgtatatgatcaagaacaggaaagagataaatatgatcaatttcctaaacgtgcagttgaaagtgaatataattatgatgagcgcactgaggaagaaccatcagtattatccagacaggctaaatacaaacaaaaaagtactgaagaactaggtattgaagatgatggttattatgcagaacctgaagttgatccaaaagaattgaaagcacaacaaaagcgagaaaaagctgaaattaaagctaagaaaaaagaaaaacgtaaagcttataaccaacgaatgaaagaacgtaggaaaaatcaacctagcgcagttagtcaacgtcgaatgaattttgaagagcgacgtcaaatttacaacaatgatatttctgaagaacgcaattcaagtgaagttaaggacaaaaaagagcaagaataaatattgatgatacccagattagtaagtagaggtcttttgcttattaatctgggtttttatatgaggttaattatcgataacgtttaattaaagtgtttaggtgtcataattttaaatgacgatttctcattaccatacacctaaattaccatcaatctgaattcagatgcttattataaaaattagatgaaaaatatgttaatatacaagtaaattaatgtgcgtatatctataggctcgtagtatacttattaaaatattaaacaaagaaaggattttaagatgaatagaaaacctgaattaatcatggcttggattgcaaatagtattagtattatttatttattagttatggggctatcctatttttctttaaaaagtggtaatgcatcacaacgtgaagaattagcgaagcaattatctcagaacggtggcaatgtttctttagatatgcttcagacaacaatgggtgcattagcaattattttattaatttcaacactttatggtatatttgcgacaatttgtattaaagggcgtagaaaattatcgattatactttttgttatcgcgataattgtaagtttgatggctcttaatttaattgcaattgtcttatgggttatcgtgatgattatgttgatttctaaaaaagaatcaaaagaaacaacacataaggacgatgagtatatttatcattaatatgttcatagcaaaagaaaaaccattaaaatgttaagttgttaattattagatacaaccaacattttaatggttttatttttaactttgtagttcttggaatgtttgaacgattaaatagacatttaaaatacttagaataataataagtgtccatgaaatgatattaacccatgttttattatagaaaggtcccatcaagtctttattactagtagctaattgtaatggtattaaacagaatggcagagcaatacttaaaaatacttgagagaatacaagtagttgctcaattttagctgcattacctttaaaaatgattaagcatacgataacaggaatgacagcaagggaacgtgtaattaaacgtcttaaccaatttggtatgtgtaatcttaaaaatccttccattacaatttgtcctgctaaagtaccagtaatcgttgaattttgacctgacgctaataatgcaactgcaaataatgtactcatgattgcacccattgttgcacctagtacaggttcagtttttaaggcgtgatataaatcatagaaaccacctaaatcgtcagcatttgagttgaaaaatagtgatgctcctaacactaataataagcaattgactacaaatgcgattgataactgaatgttcgaatctatcgtagcaaatttaatcgcttgcgccttttcttcattgttatgtcttgagtatgttctagattgtacaattgatgaatgtaagtacaaattatgaggcataattgtagcgccaataatacctaatgcaatatagagaatgccgttatttgtaatgatttcactatgtggtataaatccatttaacacagcattcaactgtggtgatgaaatatagacttcaaatataaagatgaataacactgtgaaaattaatgtaccaacaatagcttcaatttttctaaaaccatatttcattataaatagtagtaaaaatacatcaagtacagttattagtgcaccgacgattaaaggtatgttaaataggagattaagagcaatagcactaccaataacctcagcaatatctgtagcgataattgctagttctgcaatgatccaaaagattatagcaataggtcttgataaataatgtcgtgtcatttgagctaagtccatacctgttgctattcctaatctcactgtcatgctttgaagtaacattgctgataaacttgaaataagaattacgaatagcaaagtatagccatattgcgcgccaccttgcattgatgttatccagtttccgggatccatgtaaccaacagcgactaataacccaggcccaagaaatgataaaaatttctgtttatttgaactgcgatgatcgaatttaattgtattgtttatttcgtctaaacttaattgttcatttgttgaatgtcgtttattattcattttgactcacctctacttcttatggacaatataataacctaataaaatgtttaggtcaacctaaatttattttaatttttttaaaagtatgaatcattatgttgaacgttcgatttaatattaagaaaaaagagcacgaaatcatggatgtgattacgtgctctattatttaaacaaagttatttatgcagaataaaatggtaagaactgatcgaaggtttcttctaaaaatgcaataaatgctttgtcactttttaatcttttatcttgtggtgtgattgcacgcgctataaagaattcaccttttttcacattgatggctctttgtatcgcttctattaaatcatcatccgttaaatctttaataaatggtttatcaggtttcatatgatctaagcaaacacgataatcatcaggtaattgttgaatagctttaaattttctttcaaaaacttttgcacgtgttgctttatcttttgcttcatgcatgattccaaacataacaaacagttgatcttcaaacataccaatttggaaatgaggtaacattttatagcctcttttgtttgttgcaaaagcaacccatgtatctttaggaggattcacacttcttctagcatgttttgctacgtgaggataaaatgtttcaccagtttgacttgtaaagaagtcactaaaatattctcctaattcacggagttgtggtcgtatgtattcgtttaaagcttccattcgtgcgtctaagccttctacgttgaacgctttgaaatctttaggtttaaatgtatattttgtcatagagtacctcctgtatagtgtttaaaaatattgtagcatatgttttatcaattgcggcttaagacgctctcattaaaattagtattttcatttttatcataagaagttatttttataaaatgttgatgtataataaagatgttaggagatgatgttatggcactttatggatttgcccaaggacttattcaagaagcaggaattagaattaaacaattgatggagcaaaatttaacaattgaaacaaagtcaaatccgaatgaccttgttacaaatgtagataaagcaacagaagatttcatttttgatacaattttagaaacatatcccaatcatcaagtattaggtgaagaagggcatggtcatgacatcgatacttccaaaggtacggtatgggttgttgacccaatagacggtacattgaattttgttcatcaacaagaaaatttcgcaatttcaattggtatttatatcgatggtaaaccttatgcaggttttgtatatgatgttatggctgacgtcttatatcatgctaaagtaggggaaggtgcatatcgtggtagccaacccttgaaaccattgaatgattctaatctaagacaaagcattattgggatcaatccgaactggttaactaaaccaattttaggagaaatctttaaagaaattgttaatgattctagaagtgcaagggcatatggtagtgcagcgcttgaaatcgtttcagttgctacaggtaatttagaagcatatatgacgccaagacttcaaccatgggattttgctggcggattggttattttatatgaagtaaatggacaagcttccaatttactaggagaaccattaacaattagtggtccaaattcaatcttagttggaaatcgtggtctccatcaagaaattagcaacgattatttagagccccaccatgatgcgttaatacaattacatgaacaacgatttaaaagaaaatcaaaataattaccaaaagcgtaatatgaagtcctaacaattaggtaacatattacgcttttataccttaaataataaaaacacgcgccaatataaaaccagttaaatgttcatcatgaacatgtgtggtcttaaatcaacgcgtgttattgtcgatataacttatagccaatcgttttctcgatattttttctttgtagtaaatccaattccaaaggttgcaacgagtaatataaatgttaaaatcatcattggtacatttgatgcaccaacagcaaaactaaataatactaagaaaacaacagctaatatagaaaatacccaaaagatatttttagattttttttgtttcatcctatccccaccttttgcttatcttttctcaattatatgatataataaaaaagttgtaattaaaagtgggattttacttaagaaagaaggaaactatttatatgactaataaaagagaagatgtccgcaatatagcaattattgctcacgttgaccatggtaaaacaactttagtagatgagttgttaaaacaatctggtatattcagagaaaatgaacatgtcgatgaacgtgcaatggactctaacgatatcgaaagagagcgtggaattacgattctagccaaaaatacggctgttgattataaaggtacacgtattaatattttggatacaccaggacatgcagactttggtggagaagtagaacgtattatgaaaatggttgatggggttgtcttagtagtagatgcgtatgaaggtacaatgcctcaaacacgttttgtacttaaaaaagcgctagaacaaaacctgaaacctgttgttgttgttaataaaattgataaaccatcagcacgtccagagggtgttgtagatgaagttttagatttatttattgaattagaagcaaacgatgaacaattagaattccctgttgtttatgcttcagcagtaaatggtacagctagcttagatcctgaaaagcaagatgataatttacaatcattatatgaaacaattattgattatgtaccagctccaattgataacagtgatgagccattacaattccaagtagcattgttggactacaatgattatgttggacgtattggtattggtcgtgtattcagaggtaaaatgcgtgtcggagataatgtatcactaattaaattagacggtacagtgaaaaacttccgtgtaactaaaatctttggttactttggattaaaacgtttagaaattgaagaagcacaagctggagatttaattgctgtttcaggtatggaagacattaatgttggtgaaactgtaacaccacatgaccatcaagaagcattgccagttctacgtattgatgagcctactcttgaaatgacatttaaagttaacaattctccatttgctggccgtgaaggtgactttgtaacagcgcgtcaaattcaagaacgtttaaatcaacaattagaaacagatgtatctttgaaagtttctaacacagattctccagatacatgggtagttgctggtcgcggtgaattgcatttatcaatccttattgaaaatatgcgtcgtgaaggttatgaattacaagtttcaaaaccacaagtaattattaaagaaatagatggtgtaatgtgtgaaccatttgaacgtgtgcaatgtgaagtgccacaagaaaatgcaggtgctgttattgaatcattaggtgcacgtaaaggtgaaatggttgatatgactacaactgataatggacttacacgtttaatctttaatgtaccggctcgtggtatgattggttatacgactgaatttatgtcaatgacaagaggttacggtattattaaccatacatttgaagaatttagaccacgtattaaagcacaaattggcggtcgtcgtaatggtgcattaatttcaatggatcaaggttctgcaagtacttatgccattttgggacttgaagatagaggtgtaaacttcatggaacctggtactgaagtttatgaaggtatgattgttggtgaacataatcgtgaaaatgatttaactgttaacatcactaaaacaaaacatcaaactaacgtacgttctgcaacgaaagaccaaacacaaacaatgaatagaccgcgtattctaacattggaagaagcgttacaattcattaatgatgatgaacttgttgaggttacaccagaaagcatacgtttaagaaagaaaattttaaacaaaaatgttcgtgaaaaagaagcaaagcgtatcaaacaaatgatgcaagaaaacgaataatttaacataataaaagagaagctgagcgatgaaagttgcttagcttctcttttggcatataatatttgaaaaagtgtttaaatgctattatttcctgttactttcacattttcaaatttctaacttgtttattcagatattaatcgagcggatagtgttgcgcacgttgtttaggtgtgtctaatcgacttttacaatcatcacacataaatgttcgaataggattgtttttaagtcgtttagactcagttgtgcgctcatctataaatacttttgcatcacagataatgcattgcacttgtctcaaattaaatcacctcaatatgagttacatggttgattcgatatgaataaccatcttcttgattgtaaataaaactatctacaccattatcgctgtaaagtcgtttaccgtcttttgcaaattggaaaaataaatagggtaatagatctatcggtatatctaaatgattatgctcatttgataatcgaatagtagttgcagagtcatgtggttcggaatgtttgaaaaaaggtgtcatattaatgacaaatgaaccttctaacatggcacgttttttatattttatttctgaatttaaagtaggcggattagtttgtccttctaggatagcacgattccattcatgattatcttcaaagtcgattggttttgaaccatcaaatacacctttttctaaatcttcgatgctaacttttctatcatcgaaaatccaagtcgtactatctaatgttataggaaactttacggctcctttaatttgtatcattttcccactccctatcaatgtatatagcattattttaacacaaattgctaacgacacattttaaatctacttgctttttaatatttagtaagataaacttttagtaagacttgagaatttatatagagggggagcgtgtcatggcgaaacaagcaacaatgaaaaatgcagctttgaaacaattgactaaagatgctgatgaaatcttgcatctgattaaagttcaactagataatttaacattaccttcatgcccattatatgaagaagtactagatacacaaatgtttggacttcaaaaagaagttgattttgctgttaaattaggtttagttgaccgcgaagatggcaaacaaattatgttacgtcttgagaaagaactttcaaaattacatgaagcttttacacttgtttaaggtttaatatataagcatattaaaatggcgtgagatatcgacaattgagctgcgccgattttatatttatagtttaattactgattaaagtggctgttatgttgtcttcttgatgacatgtcagtcacttttattgggttttagcaattcacgatattaagtaaacaaatattctataaattacctcaagagacctgttaatatttgtgattatgactgtgtcatgtatataataagtaacatggatttttaaaattaaagtataaaacgaaatcatttgaagtataaattgtagaattggatgactgaatatatgaagaattttagaagtattttacggtatattggtaaaacctcaaagtttattgattatccgttattagttacatatattgtattgagtttaattggattagtgatggtatatagtgcaagtatggttccagcaactaaaggcacattgactggtggtatcgatgttccaggaacgtatttttacaaccgacaattagcatatgtcataatgagttttataattgtattttttattgcatttttaatgaatgttaaattactgagtaatattaaagtgcaaaaaggtatgattataactatcgtctcactattattactgacgttagtaataggtaaagatattaatggttctaaaagttggataaacttaggatttatgaacttacaggcatctgagttattaaaaattgcaatcatattatatatcccatttatgatcagtaaaaaaatgcctagagtattaagtaaaccaaaattaattttaagtcctattgtattagcattaggttgtacgtttttagttttcctacaaaaagacgtagggcaaacattactaatattaattattttagttgcgatcattttttattcaggaattggggtaaacaaagtcctaagatttggtataccagcagtgctaggattcttagtagtatttgtcattgcattaatggctggttggttaccaagttatttaactgccagatttagtacgctaacagatccattccaattcgaatcaggaactggataccatatttccaattcattgcttgcgataggtaacggtggcgtatttggaaaaggattaggaaatagtgcaatgaaattgggctatttaccagaaccacatacagattttatttttgcaattatttgcgaagaattaggtttaatcggaggattgctagttattactttagagttctttattgtatatcgtgccttccagtttgcaaataaaacatcatcatatttttataaacttgtgtgtgttgggattgccacatactttggaagtcaaacgtttgtaaacattggcggtatttcggcaacaattccattaactggtgtgccattgccatttatcagctttggtggatcatcaatgattagtttaagtattgctatgggattacttctgattgtaggtaaacaaatcaaagtagaccagcaacgaaagaaacaacaacaaaaagttgatataagaagacaatttaattaaaaaaatactagccaatatttagtacgagatgacttctgtcattaagcaatgctaaacattggctatttatatactctttgtcaaattggactgatgagttcaataacggaagttaggcaaccaaacaacgcttaacttcctttttgttttgatattacgagattactcatgattatcaaattttataaacaaaacaacgtataattataactaaattttatgactaaaaattactaaatgtggtggcgaaattagaatcatgatgataagataaagttatcgctattgataataaatgttgatgttttgcaattttatttttaattttttagagttgtagaaatcgaaaatgtttcacaacaaaaacgtgaactacctgttgttgcatagtcatttttgaaattattatttctgaagcggaggttttaattgtctcaagaatgttaaattttgaaaatttgaaacataactatagcaaaacagagcgctttaagataaaattttattatctaattagttagaaaattctaatagtttgaggagtgtatcgctattgaaacaaataaaaaagttacttgttgctaaccgtggagaaattgcaattcgtatattcagagcggcggcagaattagacatcagcacagttgcaatttattcgaatgaagacaaaagttcattacatagatataaagcagatgaatcctatttagttggaagtgatttaggtcctgctgaaagttatttaaatattgagcgtatcattgatgtagcaaaacaagcgaatgtggatgcgattcatcctggctatggatttttaagtgaaaatgaacaatttgcgcgtcgttgtgcagaagaaggaattaaatttattggtcctcatttagaacatttagatatgtttggagataaagttaaagctcgtacaacggctatcaaggcagatttaccagttattcctggtacagacggtccaattaaatcatatgaattagcaaaagaatttgcagaagaagctggtttcccgctaatgattaaagccacaagtggtggcggcggtaaaggtatgagaatcgttcgtgaagaaagtgaattagaagatgctttccatagagcaaaatcagaagctgaaaaatcatttggtaatagtgaagtttacatagaaagatacattgataatccaaagcatattgaagtacaagttataggtgacgaacatggaaatatcgtacacttatttgaacgtgattgttcagtacaacgtcgtcatcaaaaagttgtagaagttgcaccatcagttggattatcaccaacattacgtcaacgtatttgtgatgctgcaattcaattgatggaaaatattaaatatgtcaatgcaggtactgttgaatttctagtatctggtgacgaattcttctttatagaagttaaccctcgtgtacaagttgagcatacaattacagagatggtaacaggaattgatattgttaagacacaaattttagttgcagcaggtgccgatttatttggtgaagaaattaatatgccgcaacaaaaagatattacaacattgggctatgccatccaatgtcgtattacaacagaagatccgttaaatgatttcatgccggatactggaacaatcattgcttatcgttcaagcggtggctttggtgtacgtctcgatgctggagatggtttccaaggtgctgagatatcaccttattatgattcattactcgtaaaattatctacacacgcgatatcatttaaacaagcagaagaaaaaatggtacgttcattacgagaaatgcgtattcgtggtgttaaaactaatattccattcttaattaatgtaatgaagaataaaaagttcacaagtggtgattacacaactaaatttattgaagaaacaccagaacttttcgacattcagccgtctctagatagaggtactaaaacattagaatatataggtaatgtaacaattaatggtttcccaaatgttgagaaacgtccgaaaccagactatgaattagcatcaattccaactgtatcttcaagtaaaatcgcttcatttagtggtacgaaacaattgcttgatgaagtaggtccaaaaggtgtagctgaatgggttaaaaagcaggatgatgtcttactaacagatacaacctttagagatgcacaccaatcattattagctacacgagttagaactaaggatatgattaatatcgcatccaaaacagcggacgtatttaaagatggtttctcacttgaaatgtggggcggtgctacatttgatgtggcatataatttcttgaaggaaaacccatgggaacgacttgaacgtctacgtaaagctattccaaatgtattattccaaatgttgttacgtgcttcaaacgcagttggttataaaaactatcctgataatgttattcataaattcgtacaagaaagtgctaaagcaggcatagatgtctttagaattttcgattctttaaactgggtagatcaaatgaaagttgccaatgaagcagtacaagaagcgggcaaaatctctgaaggtactatttgttatacaggtgacattttaaatcctgagcgatcaaacatttatactttagagtattatgtcaaactagctaaagagttagaacgtgaaggtttccatattttagcgattaaagatatggcaggcttattaaaacctaaagccgcttacgaattgattggtgagttaaaatcagctgtagatttaccaattcatcttcacactcatgatacaagtggtaatggtttattaacatacaaacaagcaatagatgctggtgtcgatatcattgatactgctgttgcttcaatgagtggtttaacaagtcagccaagcgccaattcgttatattatgcattaaatggcttcccacgccaccttagaactgatattgaaggtatggagtcacttagtcattattggtcaactgtacgtacttattattcagactttgaaagtgatatcaaatcaccgaatactgaaatttatcaacatgaaatgcctggtggacagtattcgaatttaagtcaacaagctaaaagtttaggtttaggcgaaagatttgatgaagtcaaagatatgtatcgcagagtgaatttcttatttggtgatatcgtaaaagtaactccatcgtctaaagtagttggtgatatggcactttatatggtacaaaatgatcttgatgaacaatccgtgattacagatggctataaattagatttcccagaatcagtagtgtcgttcttcaaaggcgaaataggacaacctgtaaatggttttaataaagatttacaagcggttattttaaaaggccaagaagcactaacagctcgtccaggtgaatatctagagccagttgattttgaaaaagtccgtgagttgcttgaagaagagcaacaaggtcctgttacggagcaagatattattagttatgtattatatccaaaggtatatgaacaatatattcaaactagaaatcaatacggaaacttatcgttacttgatacgcctacattcttctttggaatgcgtaatggtgaaacagtagaaatcgaaatcgataagggtaaacgattaattattaaactagaaacgattagtgaaccagatgaaaatggtaatagaacgatttactatgcgatgaatggtcaagcgagacgtatttacattaaagatgagaatgtgcatacaaatgcgaacgttaagccaaaagcagataagagtaatccaagtcatatcggtgcgcaaatgccaggttcagtaactgaagtcaaggttagtgtaggtgaatctgtgaaagctaaccagccgttgctaattactgaagctatgaaaatggaaacaacaattcaagcaccatttgacggtgtgattaaacaagtaactgtaaataatggtgacacaatagcgacaggcgatttattaatcgaaattgaaaaagcaactgactaaaatgattaaaataaaacgagattacacaacaattgacgtgtaatctcgtttttacatggcttaggtttaattttaaatattgatataaaaaaccgtaattttaatgggcgtgccattaaaattacggtttgcttttttgttattgcttgtcacttcttactgatcgtaacattagcatgataaagtatgttgtcataccaaataaataagtgataaataatgcatggaaaagtgcgattatcaggttaacatttgtcataatagataatgcacctgtgataacttgtaatataacaagtataaatgcagctgtataaccataatgaacagtacggttatttggataatttttaacagcgtgaatataagtaatcataataatcgtaaacactataaaagccatgatacgatgcgtgagttgaacccaatcttgttctgaatgtggtacaagatcgtggaatggcaatggccaaccaccatatgctaaacttgcatccgcatgtctcactagtgcaccagtataaacaccacaataaatgatgattgccattaaccatgttaaacgtcttaatggctttttgatatataattcgtcagcttcatatttttgatctatagagaaaataatcaatgttattaaaaatacagatgagaaactgattaatgatataccaaagtgcaatgctaaaacgtaatcgttttgttgccaaataacagcagcagctccgattaatgcttgcaataataagaatccaacactaatgattgataaaggtttaatttctttaatatagcctatatgtttccatgcagtgataactaaccataagaccattaataaagacaaagctgaaacggctctatgacttaactcaataatcgtatcaataggaaagaattctggaatcaacgcaccatgacatagtggccaagaagaaccacaaccatcagctgatccggttttggtaactaaggctccaccaagttgtacaaatgtcatcattaacgttgctacgacacctaaccattttaaattctttttgccaaacaatttatacaccccatcataaaaaaacgcatcactgagaattagaattaatagccggatttgagatgatactataaattgacctgattgtaggatatgaaaagatgggatccaacgcaggaaatatgatttaattttacaagtattgtatgtggacgacataaaaagaacttaatcgtaatgatttttttattgggataattatgtaatccacgtttactcaaatttgaagcttaaatattaatctcttttagatgcatgattctacttattaaaattttctaacatatacattatagcaataaattaaatgttatttgtgtcacaaaattgacattttctcttgtcgttaatttgtcacaatttaattttattaaacctagtctttttatgcaatctaagatatcataatcttatatgaacaaatttaaggagggggattatgagcaaagagcatactttgtcacaaaatattagcagagttaacttcaaagaattgcaacagataattaaaatgggacttgttcaaggcaacttaattccggcttttgcgggcgcatggctagcagttgtaatgacaaatcattccttcttatcatcaatacctcaaattttattaatgctatttggatctactttaattatgggtggcgcatgtgcgttaaataattattacgaccaagatattgatcgtattatgcctagtaaacaaaatagaccaactgtaaataatagaattacagatcaaaatttattactattaagttttggtatgatgttagttggagaaatttgtttgtttttattgaatataccatcaggcgtacttggtcttatggggattgtaggttatgtgtcttattactcaatatggtctaaaagacatacaacatggaacacagtcattgggagttttcctggagcagtaccaccactaattggatgggttgcaattgaaggacaaattagtttaacagcgattgcgctgtttttagttgtattttgttggcaaccaattcatttttatgccttagctattaaacgtaaagatgaatatgcacttgcaaatattccaatgttaccatcagttaagggctttaaacgtacacgtgtcagtatgtttatctggttgattattttattgccagtacctttattactaataaatttaggtgtcgtattcgtagtgttagctacattattaaatttaggatggattgcattaggtttaacaacatttaagaaaaattcagatcaaacaaaatgggcaacacaaatgtttatatattcactaaattatttagtgatctttttcgtgttagctgtgattgtttcattacttactttgatctagattaattaagttaggatgaaaaatatgggcgttccaattttaccaacgattagtacgacatgtattgtcattagtgcaattttaattgccattggttggagacttatttggaaaagggaaataaataaacacaaaaatgttatgttagctgcagctgtttttgctttaacttttttcttaatctatgcaagtagaacgatttttatcggtaatacagcatttggcggaccagcatcaattaagaaatattatacgattttcttatttttccacattaatttagcaacaattggtggtattctaggcctagttcaaattattactgcatttaaagataaatataatgtacaccgcaaattcgggccattcgcttcagttatatggttctgtactgcaattacaggtgtagcagtttacttattattatatgtattatatccaggtggagaaacgacatcactgattaaagcaacatttggtcattaatatgcttatacaaatgatactaatctgataaggcaatttgttttatcaggttttttgatgaagaatagtcggacagttgatggtattcatttgataccttaactgtccatttttttatacatattttaatcttaataatgaaattcaacctgaaaatataaagataggttatgatatagagtgtagggaaaatctttatgacgttaaaattatgcctgaagatgattttgttttatcgaaacgacacagttatgtcagtgttgaaaatttgctaattaatgtgttgttttttacaatagtattaatactttttaggtggttgattgatgaaaaagttaattataagagtcgtcggtgtattatttttagttggatttttaatatatcttttttattcaccgagattaaaatttgatgtattagagaacccgaataaaggtaataaagtaaatagatctgaacaggtgaataaatcaaataaccatgctgaaaatccaaagcctaaagaaggtgttggtacatgggtaggtaaagatattaaagtgcttacttctaaatttggacaagcagatcgtgtctacccttttagagatggttacaaaaattatgtgtttaaagacaaaaacagttattacattgtttcaactaaacgtgaagaaatcgtttcagtgtatgctacaggtgagaaagtcaatgttagtccgttaaaaataggacaacattctgcagaaatttttaatcatacaagtattaatccagaaccgtcctttaaagttgatggtaaaaaatatgaatttgaactttcagatgaagatttaaaaacacaaacactgattaaatatggcgacatatatgcacaagtgtattctgatcaacaatcgaaaaaggtgctaagtgtacgatttttaacaaaagaaatgttagcagatattgaaccttatcaattaaattctaattctacgtcagaagagcataataagcgtccagttgagcaaaatccaaatcaattaatttctctttatgaagtaacgaatgaaatgagaaaattaaaaggattaaaaccattgaaaatcaatagcgatttagcacatattgcatctaataacttatatgaagcgacctctaatggttctgatagtgttgaatttacagaggacgcattaagagggcaattagataaaaatcacgttacttataaaacaactgctcaaaatgttggttatgcgtttaatgatgtaccaacattaatccatagttggatgaattcagatatacatcgatctcgtctattaaattcaaaatacgatgagatgggtggagatgtaatgagagattattattcactaattttcttagaaaaataacaatgaggggtatttatgattaatgaagcttcactagcgatattagatgatattgatgaactagctgatatgatagttgcatcagatatttatgcatcatttgagcaagctaaacaggcgctcgaaaacaatgacgaagcacatttactttatcaatcatttttaaaatcaaaagagaaatatgatgaagtaatgcgattcgggaaatatcatcctgattataagaaagttatgttagagacaagacaacgcaaaagagcatatgagatgcttgacgttgtgatgcattacaaagctagggaaatggcacttcaacatttaatagatgaagttgttacgaaaattgcgtacgctgtttcagaacatgtcaaaatagaaacaggtaatccattctttcaaacatcacatagtggttgtgcgacgggcggatcctgtaattgttcattataaaaaacatcgagtcagaaaaaggtggttattgaaaccactaactagcatctgactcgatgtttttatttattcgggattgtttgtttgaattgttgtgctaaatctggtcgatctgtcacaatcgtgtgtgcacctttttggtataaatcattcatcagatctatactatttacgccataatagcctggaatgatattcatatcatttaaccatttgataaaacgagatgaagtcaaatcaatgcctttaaaatgagtaggcatttggaacgtttgtgctaatggttggtagtacctaccacctaataaatgatattttaaaaatgcttctgtaacttcctgttggctagcaccaattgcgacggatccttgtgcaattttattaaaacgaacgatttgttctttataaaaacttgtcacaagaacgcggtcaaatgcttgattttctgcaattgtatcaaacataatttgtggtgcgattgagctttcataggattcaggagcatcttttaagtctacgtttatatacatatcaggatattgcttcagcaactcatcgaaggttagtatagctgtgtgtgcatgaccacgatatggtgttagtccattgatatctttgaagtgataagctgcgtctaatttctttaattctgctaatgtatgggcactaacttttccagagccgttcgtcgttctatcaacagttgcgtcatgaaaaacgataagctgttgatcttttgtgagtctcacatctgtttcaaagccatcaacgcctaattgtttagcatagtcaaatgcaagttgcgtttgctctggtcttaaagccataccaccgcgatgcgcaaatatatatggtgcattgcctttgaaaaaagcagggatggtttgctttttagtaatcactttatttttattgatcattaatagactacttaaaaatccagcaccgactagtaccgcatttaaaatgtttctgtttacttttttcatagaaaattcctcctcgtttacttttatagcttaacaaaatcatagttctgactacagcgaaatgtgtggttaatcatatagtgatgctcttgagaattgaattaatataatgatgtttaatataatctaaatacatttatcgagcaattacataagacataattaaggtagcttaatattttaaaattaataaagacatgatatgattaatgctgaaaataaatggagtgaggtttaaatgaatttaatcccaagaactagtattgtagtttatttaaaacatatgaaacatgaacgacaaatccgaaaatatggacatatcgttcattcaaatagagatcgtaaatttgtaattatgtatgtgaatgagcaggatgttgatcaaattgtacataaactaatgcaacttaaatacgttagacacattgatggctcaccatataaatacttaaagaaaacttacgaaaaagagaaacacgaaatatataattaatattattgaagttctggtatccatttttggagccttaacacactaattaaataattataatataacgataaatcatgaaatgcttgagggggctgtacatcgatacctaaaattggtatgtcgaatttttcagcacaatcattaatcatttgaaactttttatttgaatctggatatggatatttaatagcgttaatcatgatataaaatgcttggaaatgattgccagttgtagggttcataatgattgctacagatgactttttattttcagcttgtggtgaatgaaaatagataattttatcaatacgttgatggttatattcaatcatcgtcatgaattcgaacaaatctgttagaccttcaccaagtgtaataaatgtttgtttcattggtttatcattctcctttttctcaataaattatattaaataactaaatgaattggaagtgtgaacaacatgcgcgtcattgcaggtaaacataaaagtaaagctttagaaagtatggaaggccgtaatacgagaccaactatggataaagttaaagaaggtatctttaatagtttatatgatgtgtcaggtataggtttagatttatttgcaggaagcggggcgcttggaatagaagcactctctcgaggtatggataaggtaatctttgttgatcaaaattttaaagctgtaaaagttattaaatcaaatcttgcgaatttggatttagaggcacaatctgaagtttataaaaataatgcagatagagctttaaaagcattgtcaaaacgtgatattcaatttgatgtcattttcttagatccaccttataataaaggtctcattgataaagctttaaaactaatttcagagtttaatttattgaaagaaaatggtatcatcgtttgtgaatttagcaatcatgaagaaatagactatcaaccgtttaatatgattaaacgttaccattatgggttgacagacacattgttattagaaaagggagaatagcatggaacatacaatagcggtcattccgggtagttttgaccccattacttatggtcatttagacattattgagagaagtacagatagatttgatgaaattcatgtctgtgttcttaaaaatagtaaaaaagaaggtacgtttagtttagaagagcgtatggatttaattgaacaatctgttaaacatttacctaatgtcaaggttcatcaatttagtggtttactagtcgattattgtgaacaagtaggagctaaaacaatcatacgtggtttaagagcagtcagtgattttgaatatgaattacgcttaacttcaatgaataaaaagttgaacaatgaaattgaaacgttatatatgatgtctagtactaattattcatttataagttcaagtattgttaaagaagttgcagcttatcgagcagatatttctgaattcgttccaccgtatgttgaaaaggcattgaagaagaaatttaagtaataaaaataacagtattttaggtttatcatggtttacaatcctaaaatactgttttcatttgttaacgatattgctgtatgacaggcgtgttgaaatctgtttgttgttgcccgcttattgcattgtatatgtgtgttgctttgatttcatttgtgaagtaatgtgcattgcttttgttaatattggttatatattgtctttctgggaacgctgtttttaaatgctttaaatattgtctgccacggtcgttcatcgctaatactttaactgcgtgaatgtttctcgtaacatctgtaggtttaatgtttaataatacattcattaacagtctttggatatgcgtatatgtataacgctttgtttttagtaattttacaaaatgatgaaaatcagttgcttcataaatgttagatttcaaacgattttcaaaaccttcagtaacagtataaatattttttaatgaatctgtagtcatagctatgatttgatatttcaaatatggaaatatttgatttaatgttatatgaggtgttacgtacaagtgttgaatatctttaggtaccacatgatgccaatgatcatcttgactaatgattgatgttctaatagatgtaccacttgcaaactgatggtgttgaattaatgaatcatgatgttgagcattttctcgtttgatagaaattgcattgatgtttttagcatttttagcaattgctttcagataactaataccaagtatgttgttaggacttgctagtgcttcatgatgctctaataattcgctaatgatacgagggtagcttttaccttcttttactttttgtgaaaaggattcagattgttcaatttcattaatgctgtgtgctaattgctttaatgttttgatatcattattttcactaccaaatgcaattgtatcgacactcatataatctgcgactttaactgctagttcggcaaaatgatcgccagatgataaactggcagttgctggtagttcgataactaaatcagctgttgataatgccatttttgcacgagtaaacttattatagattgctggttcgccacgcatgacaaagttaccactcattattgcaatagtaacgtcagcatttgtaagttttttagattgattaatatgatattgatgcccattatgaaagggattatattctgtgattaagccaacgcttttcatttgcaattcgtcctttcggtattcattattaatattgtaacagaacatgatatgttaagaaaaaatcttgacaacttgttcttagaaagttaaaataaattttgtgcttgttagaggtgaagccatatgaaatggtcaattacgcaattaaggaaatatcaaggtaagccatttgaatttgatcaaacggtgagttttgacaatttaaaagaatcattagatttaattgatttatctccaattacaatccaaggtcagttaaccattaagtcaacagaagtcgttgcgaatattcacattactggaacgtatacaatgccttgtgcacgtactcttgtaccagttaaagtcccactagatgtaactactacagaagtatttgatttagaagggtacaatcagtataacgatgatcaagatgatgtagatgaacactatcacattattaaagatggtatggttaatcttcaggatattgtcgaggatatagttattattgagaaaccaatgagagcttattcagagcaaagtgaccaaatgttgacagtaggtaatggttgggaagtaatcgatgaggatcaattagatgagcttgctaaacagcaagaacaagatgattcagaatcacgacaagttgatccaaggcttcaaaaattacaacaattatatgataaagagcaataagtagtttaattaatgatataatgttgttaattaaactaacatttagtatttttcgtttataatctaaggaggatatatcatggcagtaccaaaaagaagaacttctaaaactagaaaaaacaaacgtcgtacgcatttcaaaatttcagtaccaggtatgactgaatgcccaaactgtggcgaatacaaattatcacaccgtgtatgtaaaaactgtggttcttacaatggcgaagaagtagcagctaaataattttagttactcaatataaaaagtcccgcttaaaatgattgttttaagtgggactttttatagtgcaaaaaataattggcgaacgaggtaacaggatacctcatccgccaattaaaatttgttaatttaataattaaatataaagacgattaattagtttttacgttttctaggtaatacgaatgcaacgatgctacttaaagctaataatgccattaatggtaatgtcatatctttatttgattcttcaccagtttgtggtaatgattttgctttattttcttgtgtgtttttattgttttggctttgagtgtgtccatcatttgtgtttttaatgtttgctttttgtaatggagcactatcttttgcttctctagaacctgctgaagtttgaacaacatcttttgttgtttttgatgaagcagttgttggttttacaacattttgagtcgtagatactaccttagttggagttgtactacttgattctacttcacctttagctggttttgtagcaggcgttttgtctttacctgactcactagatgcgtcattttctttttcaacacttggtaattgtttattgtcatctttttggctgtcttgtttttgtgattctttttcaacaggtgatggtgttggtttgctaggcgtagctggagtagcttccttcttagctgagttatcttgttgttcttttttgttagatttatcggtattggcttttgtaaatgcttctttatcaacgattctgacatggtattgtccatcataatcaatcgtttttacgtgaactttaacgatagcatcatatagagttttaccttcaacatatgggaaaataattgttctagtattatttttagcatctttgcttatagttctaacacgttgaccttcaaccatgaaatctttccagtaatcgtcattagtagtttccatgaccatatattttttgccgttaagcatacctgttttaatagggtgtttaacaaaagtatccatcatagattcgttattctcaacactttcataaacaacatattttgtatcttgtaaatcagtcattttttcatttgttggttgtacattttggaattcagtaatagctgatttcacttgctcatctaaagctttctttgtatcctctaatttcttcttgtactcagcctttaatttttcaggaagtttatcttgaattttatttaattcataaacttgtctttctagtgttttcgcttttttatatggcgctaataatttttcagctttataatcttcttcagttttgaatttatctgcactgttataaattggttgtgcgaattccattaatgtgtaatcgtatttttcttctttgttattgaagtgtgttgaactaacaattttaacagcttttgttccatttgatacagagaagcgaatgtaagcataatctttaacagtatcgtatgatactaatttaattggcaactttttgtcaccttcataaacttcaaattttctccaaaattgacctgattgtaatcctaattcaatttctggttttgaatcagtgaaaataactctagcaggtttaacagaacttgcataatgataaaactgttgagttccatctttctttttcatttcaaaatcaattggacgagagtttggtgcgctatgatctttgtcttttattgcagggtttttaatcgcttctctaagttcctgattcaaaataggatatgtattgttagtggcttttgctgctggtttaacttcttttgtttccttaggggctttaacttctttaacttctttaacttctttagcttcttttgtttcagaagtaggggcctcaacttctttattagatactgagacagcattagctactggtttagtttctggagctttttcagatgttgttgttggacttgcaactgcttcagtttttggttgtgcttctgtatttgtaccacctgtttcttcagctgcttgtgcttcgccatttgacattaataataaaagtgtactaatcgctacagatgcaacgcctagtgatgactttctaattgaataaaatgatttaaattctttttgctgtttgttcatgttgtagaaacaactcctaattgtatattatcaactgataatcattatcaattgattacttgtattgtacattgaaatggtagttaattgcaacgttattttataaaaaaataacctatgttatagattatgaaatatctatgacataggttaaataaaatttaaaataaaaaatatattaagttatgagtgtgacgatgatttatttagattcttttcttttgaaaagtaataaagataatgaacctaaaagggcaagtgttgcgaaggcaactgtgctaataaagttatcaactgaagttaaaccagtttttggtaattctttagctttagatgcttgtttaggcgtttcgttatgttttgtaactttgttagtttgttgtgatttattatcacttacagcttgattgttgctttcagatttcgctgttgcaacatctttaacaggtgtttgaactttattttgttcttgagcagtttgtgctgttttaactgtatgagcagtttgtgttttagtttgatcttttgttgtgtcagtacttacaactttagtagagtgattgtcttcaactttgcttgttgtagttacagtaggtttaactttttcaactttaggttgaactggtttagtttgctcagtaggtgttttaggttgagctggttttggttgaaccggtttaacattgtttggttttgctgcgtcagctaatgtaggaattgctttttcaaattccaaatgcgtagtatatctatgattgtaattaatttgtggcacgacaatatgtactttagtagttaagctcttatatccaggttcaactgcaacattgattgttctagtatccgcttttttattatcgttaacaacagttgttgctaattcttgattgtttgcattgtaaaatttgtattctttccagaatgatgcattgtttaacacggtttggaaataatatttattattttgtttaattactttaccagggtgttgcatatagtcatccatgtgtgacttctctgaagagccatctttttgcacttggaaattaattggttgtgatgttgcttgagaaacttgtgtgctttgattattagttgcgttcgtagcttctgttgccgcattgacttgttggctgtctgcgcctatgtatacaagggaacctaaaatgatagatgctgtacccattgtaatctttttcatagctgatgaacgttgttctgattgatacttactgtttaaataatgttttgtcatgttgttttcctcctaaggatacaaattatgtgttgttatatgagatgattaaccattgcaattgataatggttatcaattatactagcacatctattttcgtataacaataataaattgattataaaataaatattgacaatgataatcattattatttatgattttactaaagacttaaaagcaatcataaaaaggaggattatgttttgaaaaatattttaaaagtttttaatacaacgattttagcgttaattatcatcatcgcgacattcagtaattctgcaaatgccgcagatagcggtactttgaattatgaggtttacaaatacaataccaatgacacgtcaattgctaatgactattttaataaaccggcaaagtacattaagaaaaatggtaaattgtatgttcaaataactgtcaaccacagtcattggattactggaatgagtatcgaaggacataaagaaaatattattagtaaaaacactgccaaagatgaacgcacttctgaatttgaagtaagtaagttgaacggtaaaatagatggaaaaattgacgtttatatcgatgaaaaagtaaatggtaagccattcaaatatgaccatcattacaacattacatataaatttaatggaccaactgatgtagcaggtgctaatgcaccaggtaaagatgataaaaattctgcttcaggtagtgacaaaggatctgatggaacgactactggtcaaagtgaatctaacagttcgaataaagacaaagtagaaaatccacaaacaaatgctggtacacctgcatatatatatgcaataccagttgcatccgtagcattattaatcgcaatcacattgtttgttagaaaaaaatctaaaggcaatgtggaataatgagaaatgttaaacaaattgctacaaaatctattatagctattattagcataggtatacttacttatacaacaatgattggtagcgtgttggctgatgagataaaatatccatcagccaaatttaatcaacctgaagcaaaagataaaacagaattaactacatcaatttttgatgaaaagataaaagagaataaagcgttagagttactaatttttaatcaagaaaataaaaatgtaactgaggaacaacaactagttgacgaaaaggcgcaattgatttcagatatgactggtaaaatttacttgcaagtaaagctaaaaggtcaaattgataaagaacaacttgtttttcaaaatgacaaaaatgaagaatttccatttgttataaaagatgaaaagaatgacacaatagtaagaattttaattgaacagcatatggataaaatcgatatgcatgttaaaacattggctgaaaagaaagatctagataacaaagaaatggtgtattctattcattttaaagagaaaaaagttcaacatgatgatgcaaaagaagtgccttcaaaacatcaaaatcaagaaaataatcaagatcagcttaaaaaagatattgatgacaaaaaagatagtcaaaaatcagacattaaggaaagacgtactagccttttaactgaaaaaggattaaatgatattcctgtacaaaaagataaagtgcaacaagacagtaataaaaagattgaaaatgagcgacctaaagcatcaggtacattaaaagttgaaaatagccctccaacagtaaaaaaggttgaaaataatcacaaagagcaaccgaaacataaagatgaaaaatcaaaaaaggaaaagaaaaaagtagttgaaaaagaaaaagcgttaccagcttttaatagagatgatgatagcaagaataatagtcaattatctagtgatattaaagaacttgatgaaccaaatcataaaaagcaatatattttatttgcagctggcattgtgttagcaactattttacttatttcggcacatttatacagcagaaagagaggtaaccaagtttgagaatcataaagtatttaaccattttagtgataagcgtcgttatcttaaccagctgtcaatcttccagttctcaagaatcaactaaatccggcgaattcagaatcgtaccaacaactgttgcattgacaatgacattggacaaattggatttaccaattgtcggcaaacccacgtcatataagacattgcctaatcgttataaagatgtaccggaaattggtcaaccaatggagccgaatgttgaagctgttaaaaagttaaaaccaacacatgttttgagtgtgtcaacgattaaagatgaaatgcaaccattttacaaacaattaaatatgaaaggctacttttatgattttgatagtttaaaagggatgcaaaagtcgattacacaattaggtgatcaatttaatcgtaaagcacaagcaaaagaattaaatgaccatttaaattctgtaaagcaaaaaattgaaaataaagcagctaaacaaaagaaacatcccaaagtattaatattaatgggtgtaccgggtagctatttagtagcaactgataaatcatatattggtgatttagttaaaatagcaggtggagaaaatgttattaaagtgaaagatcgtcaatatatttcgtctaatactgaaaatttgttgaatatcaatccagatattattttaagattaccacacggaatgcctgaagaagttaagaaaatgtttcaaaaagaatttaaacagaatgatatttggaaacattttaaagctgtgaaaaataatcatgtttatgacttagaggaagtgccattcggtattacagcaaatgttgatgctgataaggcaatgactcaattatatgatttattttataaggataaaaaatagtgagctgatatgatgataaaaaataaaaagaaactactatttttatgtttgttagtcattttaatcgcaactgcttatatttcgtttgtaaccggtacaattaaattgtcatttaatgacctaattacaaaatttacaactggtagcaatgaagcagtggattcaatcattgatttgcgattgccacgtatattaattgcattaatggttggcgcaatgttagcagtttctggagcattattacaagcagcactacaaaatcctttggcagaggcgaatatcattggcgtttcttcaggtgcacttataatgagagcactttgtatgttgtttattccacaattgtacttttacttaccattattaagttttattggaggtttaataccatttttaataattatattgttgcattctaaatttagattcaatgctgtaagtatgatattagtaggtgttgcgttattcgtattattaaatggtgttttagaaattttaactcaaaaccctttaatgaaaattcctcaaggcttaacaatgaaaatatggagcgacgtatacatattagcagtatcagcattattgggattaatattaacattactattgtcccctaaattgaatttactaaatttagacgacatacaagcgcgaagtatcggttttaatattgatcgttacagatggttaacaggtttattagcagtatttttagcaagtgcaactgttgcgattgttggacaactagcctttttaggtattattgtgccacatgtggttagaaagctagttgggggcaattacagagtacttattccgttttctacagttattggtgcatggctattgttagtggctgatttattaggacgagtgatacagcctcctttagaaattccagccaatgctattttaatgattgtcggtggtccaatgctaatttacttaatttgtcaaagtcaacgaaatcgaatctaaaacggtacaacaactggtttagtgatgactgaagaaacgtcgttaataaaagaggatttttatgagaatgaagcgatttttaactattgtacaaattttattggttgtaattattatcatttttggttacaaaattgttcaaacatatattgaagacaagcaagaacgcgcaaattatgagaaattacaacaaaaatttcaaatgctgatgagcaaacatcaagcacatgtgagaccacaatttgaatcacttgaaaaaataaataaagacattgttggatggataaaattatcagaaacatcattaaattatccagtactacaaggtaagacaaatcacgattatttaaatttggattttgagcgagaacatcgacgtaaaggtagtatttttatggattttagaaatgaattgaagaatttaaatcataatactattttatacgggcaccatgtcggtgataatacgatgtttgatgtgttagaagattatttaaagcaatcgttttatgaaaaacacaagataattgaatttgacaataaatatggtaaatatcaattgcaagtatttagtgcatataaaactactactaaagataattacatacgtacagattttgaaaatgatcaagattatcaacaatttttatatgagacaaaacgtaaatctgtaattaattcagatgttaatgtaacggtaaaagataaaataatgactttatcaacctgcgaagatgcatatagtgaaacaacgaaaagaattgttgttgtcgcaaaaataattaaggtaagttaaacagaaaagaggataattatgaaatttatggcagaaaataggctgacgttaacaaaaggaacagcaaaagatattatagaacgattttatacgagacatgggattgaaacattagaaggctttgatggcatgtttgttacacaaactttagaacaagaagattttgatgaagtgaaaattttaacagtttggaaatcaaagcaagcttttacggattggttaaaatctgatgtctttaaagcagcgcataaacatgttagaagtaaaaatgaagatgaaagtagcccgattatcaataacaaagtaattacatatgatataggctatagttacatgaaataattgaatttaaagaggttgcagtacttgttatgacaattggtattgttagcttttgtaacgaccatacatgataccgatgatggtcgtttttttaatgaacacaaacatgctaacaacaaattgctaaaacatagtttgatttgaatgtgctttgaaaataatcatcaattatatcattttgatttattttgaagaagaaaagaattaataatgatattttggggcgtatgatttatagtagtagtatcgataaaagaaatttatgcaatttgaaatattatgagtgataaaagcgattaattaatattaactatacaatcaaatgttttcatcttattaatgattaatatttttatttttaaaaataaagcgaggagctatcaatggaacaaattacttctgcacaaaataatagaattaaacaagcgaacaagctaaaaaagaaacgtgagagggataaaactggattagctttaattgaaggtgtgcatttaattgaagaagcttatcaaagtggaattgtaattacacaattatttgcaattgaaccggtaagattagatcagcaaattatcgcatacgcgcaagaagtttttgaaataaacatgaaagttgctgaatctttatcaggtacagtgacaccacaagggtttttcgcaatcattgagaagccgcattatgatatttctaaagcacaacaagtattgctcatcgatcgtgttcaagatcctggaaatttaggcacattaattagaactgcggatgcagctggaatggatgctgtaataatggagaagggtacgacagatccttatcaagataaagtgttgcgagcgagtcaaggtagtgttttccatttgccagttatgacacaagatctcgatacgtttattactcaatttaatggtcctgtttatggtacagcacttgaaaacgcagtggcatacaaagaagttacttcaagtgattcttttgcattactattaggtaatgagggagaaggtgttaatcctgaattattagcacatactacacaaaatttaatcatacctatttatggtaaagctgaaagtttaaatgtagcgattgcaggtagtattttactttatcatttgaaaggttgaccgtgttgaaagttttccgatataattataattaattgtttaacagaacatttctacgtgattgcatacacaattgaatataaaccaataaaaaggcatggacatttatataaataattgttttagggagaataatcgtgactgcaagttattccaattatttaaagtcttttcacctttttggttacttaaagagatttaagtcggaaagacaatccgttatcaatattaaacaagtgtatgcttaggcataaatttgggtggtaccacggaaatgactttcgtcccttattttttaagaggatgaaagtctttttttagttaaacaacaaatatgataaatataaaatgaatagttcgaatagggaggtcagtgacatatgtctgaacaacaaacaatgtcagagttaaaacaacaagcgcttgtagatattaatgaagcaaatgatgaacgtgcactgcaagaagttaaagtgaaatacttaggtaaaaaagggtcagttagcggactaatgaaattgatgaaggatttgccgaatgaagagaaacctgcgtttggtcaaaaagtgaatgaattgcgtcaaacaattcaaaatgaattagatgaaagacaacagatgttagttaaagaaaaattaaataagcaattggctgaagaaacaattgatgtatcattaccaggtcgtcatattgaaatcggttcaaagcatccattaacacgtacaatagaagaaattgaagacttattcttaggtttaggttatgaaattgtgaatggatatgaagttgaacaagatcattataacttcgaaatgctgaatttacctaaatcacaccctgcacgtgatatgcaagatagtttctatattacggatgaaattttattacgtacgcatacatcaccagtgcaggcacgtacgatggaatcacgtcatggtcaaggtccagttaaaattatttgccctggtaaagtgtatcgtcgtgactctgatgatgcgacacatagtcatcaatttacacaaatcgaaggattagttgttgataaaaacgttaaaatgagtgatttgaaaggcactttagaattgttagctaagaaattatttggtgctgatcgtgaaattcgtttacgtccaagttacttcccattcactgaaccttctgtagaagttgatgtgtcatgttttaaatgtaaaggaaaaggttgtaatgtgtgtaaacacacaggatggattgaaattttaggtgctggaatggtacatcctaatgtattagaaatggctggttttgattcttcagagtactctggatttgcatttggtatgggaccagaccgtattgcaatgttgaaatatggtatagaagatattcgtcatttctatactaatgatgtgagatttttagatcaatttaaagcggtagaagatagaggtgacatgtaatgttgatatcaaatgaatggttgaaagaatatgtaacaatcgatgattctgtaagtaatttggcagaacgtattacgcgcacaggtattgaagtggatgatttaattgactacacaaaagatatcaaaaatttagttgtcggcttcgttaagtcaaaagagaaacatcctgatgctgataaattaaatgtttgccaagttgatatcggagaagacgaacctgtacaaatcgtttgtggtgcaccgaacgttgatgcaggacaatatgtcattgttgctaaagtaggtggcagattgcctggtggtattaaaattaagcgtgccaaattacgcggtgaacgttcagaaggtatgatttgttcgttacaagaaattggtatttcaagtaattatgtaccgaaaagttttgaatcaggcatttatgtttatagtgaatcccaagttccaggaacagatgccttacaagctttatatttagatgatcaagtaatggaatttgatttaacgccgaatcgtgcagatgctttaagtatgataggtactgcttatgaagttgcagcattatataatacaaaaatgactaagccagagacaacatcaaatgagcttgagttatctgcaaatgatgaattgactgtgacaattgaaaatgaagataaagtaccatattatagtgcacgtgttgttcacgacgtgacaattgaaccctcgccaatttggatgcaagcacgcttaataaaagcgggtatacgtcctattaataatgttgttgacatttcaaattatgtgttattagaatacggtcaaccattgcacatgtttgatcaagatgcgattggttcacaacaaattgttgttcgtcaagctaatgaaggtgaaaaaatgacaacattagatgatacagaacgtgaattattaacgagcgatattgtcattactaatggacaaactccaattgcattagctggtgttatgggtggcgatttttcagaagttaaagaacaaacatcaaatatagtgattgaaggtgctatttttgatccagtttcaattcgtcatacatcaagacgtttaaatttacgcagtgaatcatctagtcgttttgaaaaaggaatagctactgaatttgtagatgaagcagtcgaccgtgcatgttatttattacaaacttatgcaaacggaaaagtgctaaaagatagagtgtcttcaggagagcttggtgcatttattacaccaatcgacatcactgctgataaaattaatcgcactattggatttgatttgtcacaaaatgatattgttactatttttaatcaactagggtttgatacagaaataaatgatgatgatattacagtgcaagtaccatcacgtcgtaaagatattacaattaaagaagatttaattgaagaagttgcacgtatatatggttacgacgatattccatcaacgttacctgtcttcgaaaaagttactagtggtcagctaactgatcgccaatataaaactagaatggttaaagaagtgttagaaggtgctggattagatcaagctattacgtattcgttagtttctaaagaggatgctactgcattttcgatgcaacagcgtcaaacaattgatttattgatgccaatgagtgaagcgcatgcgtcattacgtcaaagtttattaccacatttaatcgaagcggcatcatataatgtggcacgcaaaaataaagatgtaaaattatttgaaatcggcaatgtcttctttgctaatggagaaggtgaactaccagatcaagttgaatatttaagtggtattttaactggagattatgtagtcaatcaatggcaaggtaagaaagaaacggttgatttctatttagcaaaaggtgtcgtggatcgagtatctgaaaagttaaaccttgaatttagttatcgtcgtgctgatattgatcgattacatccaggtcgtactgctgaaatcttattagagaataaagttgttggttttattggtgaattacatccaacattagcagctgataatgatttaaaacgtacgtatgtttttgagttgaattttgatgcattaatggctgtgtcggtaggttacattaattaccagccaattccgagattcccaggcatgtctcgtgacattgcattagaagtagatcaaaatattccagcagctgatttattatcaacgattcatgcacacggtggcaatatattaaaagatacacttgtctttgatgtatatcagggcgaacatttagaaaaagggaaaaaatcaattgcaatacgtttaaattatttagacacagaagaaacattgacagatgagcgcgtttcaaaagtacaagcggaaattgaagtagcattaattgaacaaggtgctgttattagataatgatttaaaccccatgtataaggatatctgaagtagattgatatccttaacatggggttttatttttggattcacctattaggttccaattcatttaaaaagtcaaagaggaacagcggaatacagatgatgcttcgcacaactgcatataaagtcatacttatgagcaaagcaaattagtatgacttacctaataggatttcctattaggatccaatttataatgattaaaaatcaaagaggctttaaaattttttgggctttttcacgatttttaaaatgcttttttgaaatggtatctaaacgtgaaagaccgtatttttttataattttggcggcgattacatcgactttagcaccggcacctttaggaatcgtcatattaatattttttgatatttgatccatatatgtaacaaatgcgtatcgagaaattatgcttgccactgcaatggctaatgacttcgattctccttttgtttcaaattttgttttctttggaagtggtatatcggataatgcgtaatggttatacacttcgcgttttgcgaactgatcaatgacgatatagtctaattgagacgaatcaattttttcaagtacatttttgatggcttcattatgaagaacagctttcatttttacttgagtccagccttttgcttgctgaatattatatttttcattgtgtagtgttaatagtgaatgtgggatgaaagtaaccaattgctcagcaagttctacaattttggtatcggttaatttttttgagtcatctacacccaaagtttttaaaatagggacatgctctttggtaacgaaagcagcacacacagtcaacggaccaaagtaatcgccacttccagcttcatcactaccaatacagttaaattgatcatacattaaagtttgttcaagaaaagaattagccatatttttctttttagttttattagtattcaattgagaatgctgcggtagaagttcttcagacacagcttctgcatgattaccctgaaacatgactttacctgattggtaaatatttacagttgtattttgatactttgcacgtgctttcataccttgaggtaaattctcagtatcaaaagaaatgcgtgacattaatgtcgttatgtctttatccgacaatttaaaaacgatattcgccatttgtgtaaatcctttcatataatttcattatcattagcaaaaataatcatatcataaatgataataacgtcagaaacatttatatatgttgtaaagaattaattgcggatacttacaaaatacatagtggtcatgtataatgtttatgaaaatgttatagtgacacaatttaaacatgataaagtattgaatagaaaattctttacattatttcatttcattataaaaagtacattaagtcatctatagagattgtgttgttgttttatcataattgcaatataacaatattagtatcaaattcagacaaactatccagtcatattttataacgtgaatttagattttaaaaaaaggatcaggagaaattataaatggcacagtttaaaaacaaggtaaatgtatcaattaatgatcagctttttacaattgttggggaagataacccagagcacatacgatatgtagcacatttagttgatgataaaataaaagaattagggtataaagcagcaggtttagatacttcaagaaaagcaatactaactgctgtgaatattatgcatgaaaaagtactactagaagaagaaaatcgacgtttgaaacaacaaattcacaaattgcagcagcgtgagcaataaatggtcattgattttatcataatcattttctttgtgtattttgtcatcgttggattcagacgaggtttttggttatctatgatacatttgagtgcaacgattgtatcattgtggattgccagtcaattttacaaatctattgtagaaagattaattgtatttattccatatcctaaaacaacagcatttaatacaacttttgcgtttcattttaatcatctacaaaatcgatttgaagcgattgtagcttttttaatgattacattgttttgtaagttcattttatatctaattatcgtaacttttgataaaataatagcgtatcaaaacattcatattttcagtcgtgcaatgggaatgatagttggtgtgtttatgacgataattgtcttacactttacgttatatctattggcattatatcctaacgaagcattacaacatcagcttaaaatatctattgtgagtcattcattgatttttcacatcccatatttatcggctttcaccattaatttataaattatcataagaggtcaggacaaaggtatatattaatgatacgtcctggtcttctttttatggagtgttattatgacaaaaaaagatgttatcaaactattagaacaaattgctacttatatggaattaaaaggggaaaatacttttaaaatatcagcgtatcgaaaagcagctcaaagtcttgaattagatgaacgaccattagatgaaatatctgatgtaacggagttaaaaggcattggtaaaggtgttgcagaagtaatcaatgattaccgtgagaccggtgaatctcagtatttacagcaattacaggaagaagttccggaaggtcttattccacttttgaaaattcaaggacttggaagtaagaaaattgctaagctatataaagagttgaatattgttgataaagcgtcacttcaagttgcttgtgaaaatggaaaagttagtgaattaagcggatttgctaagaaaacggaacaaaacatattagaagctgtgaaacaacttagtgctaagaaagatagatatccaattgatcaaatgagaagacttaatcaagaaatcattgattatatagatacattaaattatatcgatcaatattcatctgcaggaagcttccgtcgttttaaagaaatgagcaaagatttagatttcataataagtaccgataacccaaaagcagtgcagcagcaattattaaatattcccaataaagtaaaagaagttgcagtggggaacacaaaagtttcattagaattagcgtatgatgatgaaacgattggtgtcgattttcgattaattgaaccaagtgctttttatcatacattgcagcattttactgggtcaaaagaacataatataagaattcgacaacttgctaaagcacgtgatgaaaaagtaagtgaatatggaattgaacaagctgatggtacattaattcaatatgatagtgaagccaagatatatgaacattttaatgtgaattttataccacctgctatgcgagaagatggtagcgaatttgataaagatctaagtaatatcattacattagatgatattaatggtgatattcatatgcatacaacgtatagtgatggtgcgttttctattcgagacatggtagaagcaaatatcgcaaaaggttataaattcatggtaattactgatcattcacaaagtttacgtgttgctaatggcttacaagtggaaagacttttaagacaaaatgaagaaattaaggttttagataaagaatatagtgaaattgatatttattcaggtacagaaatggatatattacctgatggctcgctggattatgatgatgaaattttagcacaacttgattatgtaattggagctattcatcaaagctttaaccaatcagaagaacaaattatggaacgattagctaatgcatgtcgcaatccatacgtgcgacatatagcgcatccaacagggcgtattataggtagaagagatggttataaaccgaatattgaacaattaatggcattagctgaagaaacgaatacagtattagaaattaatgccaatccacatcgactggatctgaacgctgatatcgttcgtaaatatccaaatgtgaaattaactattaacactgatgcgcatcatacaaatcatttagattttatgaattatggcgtagcaactgcgcaaaaaggatttgtaacaaaagatagagtgattaacgcattatcgcgtgaagcttttaaagactttattgaaaataatataaaacttaagaaatagagggattttatgagacaaaaaacattagacgtcttagaattcgaaaaaataaaatcactcgttgccaatgaaactattagtgacttaggcttggaaaaggtcaatcaaatgatgccagctactaattttgaaacggttgtttttcaaatggaagaaacggatgagattgctcaaatctataataagcatcgtttaccaagcttgagtggcttatctaaagtatcagcattcattcatcgcgctgatattggcggcgttttaaatgtatcagagcttaacttgataaaaagattaattcaagtacaaaatcaattcaagacattttataatcaattggttgaagaagatgaaggtgttaaatacccaatattagatgacaagatgaatcaattacctgtgttaactgatctttttcaacaaataaatgaaacatgcgatacgtatgatttatatgataatgcgagttatgaattgcaagggattagaagtaaaatttctagcacgaatcaacgtattagacaaaatttggaccgtattgttaaaagccaagcaaatcagaaaaaattatcagatgctattgtaacagttaggaatgaaagaaacgttatacctgtcaaagctgaatatcgacaagattttaatgggattgtacatgatcaatctgcttcaggacaaacattgtatattgagccatcatcagttgttgaaatgaataatcaaattagtcgattacgtcatgacgaagcaattgaaaaagaacgcattttaacgcaactaactggttatgtggctgcggacaaagatgcactacttgtggcagaacaagtcatgggtcagttagattttttaatcgcaaaagcgagatatagtagaagtattaaaggaacaaagccgatatttaaagaggaccgtactgtatatttacctaaagcataccatccattattaaatcgtgagactgttgtagctaataccatcgaatttatggaagatattgaaacggtaattattacaggaccgaatacaggtggtaaaactgtaacattaaaaacattaggtttaattattgttatggctcaatcaggattgttgattcccacacttgatggtagtcagttaagtgtatttaaaaatgtatattgcgatatcggagatgaacaatcaatagaacaatcattatcaactttttcatctcatatgacgaatatagttgaaattttaaagcatgcagacaaacatagtttagttttatttgatgaattaggtgcaggtacagatccgagtgaaggtgctgcattagcaatgagcattttagatcatgttagaaaaattggttctctagtaatggcaacgacgcactatcctgaacttaaagcatatagttataatcgagaaggcgttatgaatgcgagtgtagaatttgatgtagatactttgagtccaacgtataagttattaatgggtgtgccgggtcgttcaaatgcttttgacatttctaaaaagttaggtcttagtttgaatattattaataaggctaagacgatgattggtactgatgaaaaagaaataaatgaaatgattgaatcattagagcgtaattacaaacgtgtagagacacagaggttagaactggaccgtcttgtaaaagaagcggagcaagtgcatgatgatttatctaagcagtatcaacaattccaaaattatgaaaagtctctaatagaggaagcgaaagaaaaagcaaatcagaagattaaggctgcaacaaaagaagctgacgatattattaaagacttaagacaattgcgtgaacaaaaaggtgcagatgttaaagaacatgaattgattgataagaagaaacgattagatgatcattatgaagcgaaatctataaagcaaaatgtacaaaagcaaaaatacgataaaattgttgctggtgatgaagtaaaagtattatcttacggtcaaaagggtgaagttttagaaattgtcaatgatgaagaagcaattgttcaaatgggaattattaaaatgaagttacctattgaagatttagagaaaaaacaaaaagaaaaagttaagccaacgaaaatggttacacgtcaaaatcgtcaaacaattaaaactgaacttgacttacgaggctatcgttatgaggatgctttaattgaactagatcaatatttagatcaagccgttttaagtaattacgaacaagtttatatcattcatggtaaaggtacaggtgcacttcaaaaaggtgtacaacaacatttgaaaaagcataaaagtgttagtgactttagaggtggtatgccaagcgaaggtggatttggcgttaccgttgcaacactaaaataaattataatttgataaattaaatagctgcagttaaaataatgtaaagcaacaagaatacatttcaaacatgttatttgaaataagcataaaaattgagcaaatagaaatacatgaagcatgttatctgatataatttgaacatcataataataattaaggaggattggcatttatggcaatcgtaaaagtaacagatgcagattttgattcaaaagtagaatctggtgtacaactagtagatttttgggcaacatggtgtggtccatgtaaaatgatcgctccggtattagaagaattagcagctgactatgaaggtaaagctgacattttaaaattagatgttgatgaaaatccatcaactgcagctaaatatgaagtgatgagtattccaacattaatcgtctttaaagacggtcaaccagttgataaagttgttggcttccaaccaaaagaaaacttagctgaagttttagataaacatttataagttacaaccaatgacgactggggcatttctttaatgaattgctccagtttttgtttgtgtttttaatataaaaagttgaatgataagtcatcatattgtttacgacttgagaatggtgggattaataaatctatgaacgttaaatgataatctagcatgctgatagatttgtagcagttggtttgataaaaccatgttcaatattacatgatgtgcatgaaaagtcatactcgaagatgttgattattaactagaattagtggtgataaatttgaagcacttttgtagcatcattcattttaaaattagaaggggggatatttttggaagactataagcaacgaattaaaaataaattaaatgtcgtacctatggaaccaggctgctatttaatgaaagatcgtaatgatcaagtgatatatgttggcaaagctaaaaagctaagaaatcgattgagatcatattttacgggtgctcatgatgctaaaacaacgagactggttggtgaaatacgtcgttttgagtttattgtcacgtcaagtgaaacagagtcacttttactggaattgaatctgataaaacaatatcaaccaagatataatatattattaaaggatgataaaagttatccatttattaaaattacgaaggagaaatatcctagactactagtgacgagaactgtaaaacaaggtactggcaaatatttcggaccgtatccgaatgcatattctgctcaagaaactaaaaagttattagacagaatatatccatatcgcaaatgtgataagatgccagataaattatgtctttattaccatattggacaatgtttaggaccatgtgtatatgacgttgatttgagtaaatacgcacaaatgacgaaggaaattactgattttctgaatggggaagacaaaacaattttaaaaagtttagaagagcgaatgttaactgcaagtgaatcacttgattttgaacgggctaaagaatatagagatttaattcaacatattcaaaatctgacaaacaaacaaaaaattatgtcatcagataaaacgattcgtgatgtctttggttattgtgttgataaaggatggatgtgtatccaagttttctttatacgacaaggtaatatgataaagcgagatacaacgatgattccattacagcaaacagaagaagaagaattttatacatttattggacaattttatagcttaaaccaacatattttacctaaggaagttcatgtaccacgtaatttggataaagaaatgattcaatctgttgtggacactaaaatcgttcaacccgcgcgaggtcccaaaaaagatatggttgacctagctgcacataacgctaaagtatccttaaataataaatttgaattaatatcacgtgatgagtcaagaacgattaaagctattgaagaacttggaacacaaatgggaattcaaacaccaattagaattgaagcattcgataattctaatattcaaggtgtggatccagtgtcagcaatggttacatttgtcgacggtaaaccagataagaaaaattatagaaagtataaaatcaaaacggttaaaggtccagatgattacaaatcaatgagagaagtagtaagacgacgatattctcgcgttttaaacgaaggattaccattacctgatttaataatagtcgatggtggtaaaggacatatgaacggggttattgatgtgctacaaaacgaattaggtcttgatatccctgttgcaggtttgcagaaaaatgataaacaccaaacatctgaattattatatggcgctagtgcagaaattgtaccactgaagaaaaatagccaggcattttatttgttgcatcgtatccaagatgaggttcacagattcgcaatcacatttcatagacaaacacgtcaaaagacaggcttgaaatcaatacttgatgatatagatggtatcggtaacaaacgtaaaacattattattgcgttcattcggttcaatcaagaaaatgaaggaagctacacttgaagattttaaaaatataggtattcctgaaaacgtcgcaaagaacctacatgaacaattgcataaataaattactgggcgtgagaatcattctcatgccccaaaatatatgaaataatgttacaatatggttaacaaagttatttttttgaatgtacgtggaagcgttttctaaatgagaaagtttatcatcacaagcaattttaaatatcgaatccaaatgttacattgttcgacatgcagtttggtgatcgtacagtgtgtatttgtctttaaaatgtttcgcttaatgataatgacaacgctagaaacgatatcactttagggggttaagcgtacgtttaatataaatagctcaataaattaaatattcgttcacaggggggactccttttggctcaatcaaaaaatgaattttatctaagacgtattcactcgttattaggtattatcccaataggtgcatttttggtcgttcatttattagtgaatcaccaagcaacacaaggtgctgaagcgtttaataaggcatctaactttatggaatcattaccatttctaattattgtagaatttttatttatatacattccgttgttatatcacggtttgtttggtatacacattgcatttacagcaaaagaaaatgttggacattactcgatttttagaaactggatgttcttcttccaaagagtgagtggtatcttaacatttatctttattggtatccatttatggcaaacacgtttacaaaaagcattttacggcaaagaagtgaattacgatttaatgcacgaaacattgcaacatcctggatgggcaatattttatattatttgtattattgctgttgtgttccactttgcaaatggcttatggtcattcttagttacttggggtggacttcaatctccaaaatcacaacgagtatttacatgggtttcattaatcgtatttttagttatttcgtatattggtgttactgcaattattgcctttatgtaatacatcgcatttaacaaatatagattgaaaatttaggggagtgaaatttttatggcagagaaacatcttattgttgtcggaggtggcctagcgggcttaatgtcaacaattaaagcggcagaaaaaggtgcacatgtagatttgttctcagttgtaccagtaaagcgttcgcactctgtttgtgcccaaggtggcattaatggtgcggtcaatactaaaggggaaggcgattctccttggattcactttgatgatacagtgtatggtggcgacttccttgcaaaccaaccacctgttaaagcgatgacagaggcagcacctaaaattattcatttattagaccgtatgggcgtaatgttcaatagaacaaatgaaggtctattagattttagacgtttcggtggtacattacaccacagaacagcatatgcaggggcaacaactggacaacaattattatatgcattggatgaacaggttcgtgcatatgaagtagatggattagttacgaagtatgaaggatgggaattccttggcatagttaaaggtgacgatgatagtgcaagaggtatcgttgcacaaaatatgacaactgctgagattgaaacatttggttcagatgcagttattatggcaacgggtggccctggtattattttcggtaaaacaacaaactcaatgattaatacaggatcagcggcttccattgtttaccaacaaggcgctatttatgctaatggtgagttcattcaaattcatcctactgcaatccctggtgatgataaactgcgactaatgagtgaatcagcacgtggtgaaggtggacgaatttggacatataaagatggtaagccttggtacttcttagaagagaaatatcctgattatggtaacttagtacctcgtgatatcgcaacgcgtgaaattttcgatgtatgtattaaccaaaaattaggtataaatggcgaaaacatggtatatcttgatttgtcacataaagatccacatgagttagatgtaaaactaggtggtatcattgagatttatgaaaaattcactggtgatgacccacgcaaagtaccaatgaagattttcccagctgttcactattcaatgggtggtctatatgtagattatgatcaaatgacaaatattaaagggttatttgcagctggagaatgtgacttctctcaacatggtggtaatcgcttaggtgccaattcattgttatcagcgatttatggtggtacagtagcaggtccaaacgcgattgattatatttcaaatattgatcgatcatatactgatatggacgaaagtatttttgaaaagcgtaaagctgaagagcaagaacgttttgataaattattagctatgcgcggtacagaaaatgcctataaattacaccgtgaacttggtgaaattatgacagcaaatgtaactgttgttcgtgaaaatgaaaaactgttagaaacagataaaaagattgttgaattgatgaaacgttatgaagatattgatatggaagatactcaaacttggagtaaccaagcggtattctttactcgtcaattatggaacatgttagtacttgcacgtgttattacgattggtgcatataaccgtaacgaatcacgcggtgcccattataaaccagaattcccagagcgtaatgatgaagagtggttaaaaacgacaatggcctcattccaaggcgcatttgaaaaaccacagtttacttatgatgacgtcgatgtgagtttaataccacctcgtaaacgtgattacacaagtaagtctaaagggggtaaaaaataatgactgaacaatcagtgaaaaacactccacaacatgaaacacaatctaaaccgaaacaaaaaacagtaaaattaattattaaacgacaagatacaagtgattctaagccttatgaagaaacatttgaaattccatatcgtgaaaatttaaacgtcattgcttgtttaatggaaattagacgtaacccagttaatattaaaggtgaaaaaacaacacctgttgtctgggatatgaactgcttagaagaagtatgtggagcatgttctatggttatcaatggtcgtgcaagacaatcttgttctgcgattgttgatcaattagaacaacctattcgtttagagccaatgaatactttcccagttatccgtgacttacaagttgatcgttctagaatgttcgataacttaaaacgtatgaaagcatggatcccaattgatggaacgtatgatttaggtccgggaccacgtatgccagagaaaaaacgtcaaacagcttatgaattatctaaatgtatgacatgtggtgtatgtttagaggtttgtcctaatgttactgaaaataataaattcgttggtgcgcaagcaatctcgcaagttcgtttgtttaatttgcacccaacaggatctatgactaaagatgaacgtttaaatgcattaatgggtactggtggcttacagcagtgtggaaattcacaaaactgtgttaatgcttgccctaaaggtattccattaacaacatccattgcagcaatgaacagagaaacaacattccacatgtttaaatcattctttggttcagaccatgaagtagaataaaaattaatcccttttgagttaaaatgttatgttcctttcaaaattaaattgaatggagatacacaataacttggaagggatttttttaataagcagattacatgacaatatgatagtgggctgatttaaaataaatattatattataatgacaaaaatggtaaacacagtgcataatactaaaatccaatgcttagttatgataaactaaaaattaaattaaaagtaaggatgaccgaatatgaataaaccaataggtgtaatagactctggtgtcggaggtttgacagtagctaaagaaattatgcgtcagttgccaaatgagacgatttattacttaggtgatattgggcgatgcccatatgggccaagaccaggagaacaagtaaaacaatatacagttgaaatcgctcgtaaattaatggaatttgatataaaaatgctcgtgattgcttgtaatacagcaactgctgtagctttagaatatttacaaaagaccttatcaatcccagtgattggcgtaattgaaccaggtgctagaacagcaataatgactactagaaatcaaaatgtattagtactaggaacggaaggcacaattaaatctgaagcatatcgtacgcatattaaacgtatcaatccacatgtagaggtacatggcgttgcctgtccaggttttgtgccacttgtagaacaaatgagatatagtgatccaacaattacaagcattgtcattcatcaaacactgaaacgttggcgtaatagtgagtctgatactgtcattttaggatgtacccactatccattgctctataaacctatctatgattattttggtggtaaaaagacagtgatttcgtctggattagaaacggctcgtgaagttagtgcattgctaacatttagtaatgaacatgcaagttatactgaaaatccagatcatcgattttttgcaacaggtgatcctattcacattactaacattatcaaagagtggttaaatttatctgtcaatgtggaacgtatatcagtgaatgactaggaggatttttaatgaaagagattgttattgcatcgaataatcaagggaaaataaatgactttaaagtaatatttccagattaccacgtaataggtatttcagaactaataccagattttgatgtggaagaaacaggatcaacatttgaagaaaatgctatattaaaatcagaagctgctgcaaaagcattgaataaaacggtcatagctgatgacagtggactagaagtttttgcattaaatggtgagccaggtatatactctgcacgttatgctggtgaaaataaaagcgatgaagcaaatattgaaaaattattaaataagcttggtaatacaactgatcgtcgtgcgcaatttgtttgtgtcataagtatgagtggccctgatatggaaacaaaagtatttaaaggtactgtttcaggtgaaattgcagatggaaaatatggcgaaaatggtttcggatatgatccgatattttatgtaccgaaattagataaaaccatggctcaactttcaaaagaacaaaaagggcaaattagtcatagacgaaatgcgattaatttacttcaagcttttcttgaaggtgataaaaatgtctaaatggatcattgtgagtgataaccatacagaatcaggcgttttatatcaaatttatgaaatgcacccagatgcagatgtatatttacatttaggagattcagaattcgcgtatgatgatacggaacttagcttatttaatagagtaaaaggcaattgtgatttttacccagaatttgaaaatgaagcggtcgcaaaatataatgacgtgaaagcattttatactcatggacatttatatcaagtcaatcgaacaagagatttattagctgaaaaaggacttgaattaggttgtatgtttgcattttatggacatacacatgtggcaaaatatgagtatattaatggtgttcatgttattaaccctggaagtatatctcaatctagaagttcaatggaagaaacatatgctgaagttattattgatgatcaaactttacatggcaccatcaatttcaaaaatcgacatcacgaaacaatcagtcatactactttttaaatagaagtagctatggctttttttagtttatagactgatttaactaggaggtcgtgtcatgaatgtttgtttaaaagtatttctgacaattttataagataattggaatgaataacacatttatgttatgaaaagaattgtaattttagagaatgtgattgttgatgaccctatatggttgaatcatgttgattatttggttaaaagtgtattattaaaaagtataaaattaagattccaagaagtcaggaaatttgaaattttagttaaaatcatgattcgtatacatatttaaaaggatttctaaagtcataaattatatcaataatttgatggttaaaatatggagtagcaaaattcttggaattcagaaatgtagtgacacaaatattaatgtttagttaataaatagttaatgtagttttttgtatctgtctattattataaatatatacaaaataaatatttgaggataggtgttattaattatgaaaaagaattttattgggaaatcaattttaagcatagctgctattagtttaacggtatcaacgtttgccggtgaatctcatgcacaaactaaggttgaaaaatataacgagtatcaaacaaactttaaaaaacaagtaaataaaaaagttatggacgcacaaaaagctgtaaacttgttcaaacgtacaagaactgttgcaacacaccgtaaagcacaaagagctgttaatttaattcatttccaacacagctatgaaaagaaaaaattacaaagacaaatcgatctagttttaaaatataatactttaaaataattgatagaagccatgctatagagtgtggctttttgctatattcaaaggtataattagtttataatattgtgttcatttgaatggtgagattattagaataaataatataaataattacttaaaagtgaatgcaatagttgtttatgttttgaacaagcgaggtggctattgtgaaaaggaaatcgaatgtattaacaatcataaaaattgtaacggatatagtggcaaccgtgttaatcatacgtgctttattaaacagtcgtaaagatgctaaataaattagaagttacttaaaataaaaaaagcacgccaaaacgttagcattgttttctaacgtttggcgtacaactatttaattcagtatgttaattaatcccaataaatcgagtcaatttcaccgtttttaacaactttaatattttttctgttctcttctaaaggacgagttaagtcaaaagtatagtaatctctaggaccaccatctttaattctgacaactgctttcttcacatcaccttggcttaattttttaacaataaggtacagatcattaacagtttcagctttgtaaggagttagatttttatcagactctttcattaacttatcaatacgttcatcgtcctttttagcttgatctgctaaattttttgcgatttctaaacctttccattcataactaaagaaagctttagcatcattagtttgagttgaaagacctgcagcgattactgtagatgcgataatagtttttgtgatattttttttcataataagttctccctgtaaaatagatttgtacttactaatgcgagtacactgttattttacaaacggtttcatgcatttaccagttaacacttcattaattaaaattaagtgcaaattaataaggtttaatgcaatcgaaaaagaataaatatgaatttgatgttattatttttatttgaggtattattggatttgttgatagtataataatagtagtaaacgttactcaactatgattggataatttttattgttaaaacgatatatatttctttgtattttgtttgctatgatggatagacaaacactccaaattgttatacatatagctgttttgatatatattttttataaaacaaagaaatgattcatagtagagaagtaattaatatgtataattttacttataaagaaataagagatatattctaattatggttgatatgttatgattaatatataagttaaaaattatactatttagttgtattatgcattttctaagtaaacataattcaacacttacatttttaaatagataaaatagtgtaaaatcacgtgccaagattactatagagtaggcattgagtattattggcaatcacttaagtgattgttattttttcgtggtcaataataaagatataaataaatatattgaggtcaaacgatgataattaaaattttaacaattctattactactttgtatattgagctatttggttacaaatagaaagaagccttttctgttcttaaaaacactctttatgggtgtggtatttatctttataggatatatttcactggcaatatctgccgtaattatttatggcattattcaatttatcacaattgattttggtagttttttcttaatgggtattatattaatcttgatttcaagtatattccaattatttatagttagattactttttagaaaaaagaatgtcgatttgacagaggttgtcgttttagaacatttaattcaatggttcttagtttactttgcgatctatcaagcagtaaatgaaaaaatggacattaatgatattaatatcgacaattttcaatctgtcttttttgacgtgtctaatttgaatttagtaattctaccaacgttaatcattagctgggtcacaatatttaactatagaatgagaagttacaaataaaatctatgagattataccttcagacaccaacattcaaatggtgtcttttttgttgtgtggttttatttttgaaattcgaaaaagtagaggcatgaattttttgactagtgtataagtgctgatgagtcacaagatagatagctatattttgtctatattataaagtgtttatagttaattaataattagttaatttcaaaagttgtataaataggataacttaataaatgtaagataataatttggaggataattaacatgaaaaataaattgatagcaaaacctttattaacattagcggcaataggtattactacaactacaattgcgtcaacagcagatgcgagcgaaggatacggtccaagagaaaagaaaccagtgagtattaatcacaatatcgtagagtacaatgatggtacttttaaatatcaatctagaccaaaatttaactcaacacctaaatatattaaattcaaacatgactataatattttagaatttaacgatggtacattcgaatatggtgcgcgtccacaatttaataaaccagcagcgaaaactgatgcaaatattaaaaaagaacaaaaattgattcaagctcaaaatcttgtgagagaatttgaaaaaacacatactgtcagtgcacacagaaaagcacaaaaggcagtcaacttagtttcgtttgaatacaaagttaagaaaatggtcttacaagagcgaattgataatgtattaaaacaaggattagttaaataaaacttcaatcgttgctgatatctggaaataattaattaaatgttatgttaatttttgttaatgaaaaaagtaatctatttaatgacaggttaatgtaattgtcctgaaattgactatatactcagtaagtatcaattttaaggagagcttataatgaaatttaaaaaatatatattaacaggaacattagcattacttttatcatcaactgggatagcaactatagaagggaataaagcagatgcaagtagtctggacaaatatttaactgaaagtcagtttcatgataaacgcatagcagaagaattaagaactttacttaacaaatcgaatgtatatgcattagctgcaggaagcttaaatccatattataaacgtacgattatgatgaatgaatatagagctaaagcggcacttaagaaaaatgatttcgtatcaatggctgatgctaaagttgcattagaaaaaatatacaaagaaattgatgaaattataaatagataataaataaaacaggttgagacaaaaaatggtcttaacctgttttcaatttgcatatgtgataaattctatatcaaaatgcttatgtataatgaatgacatttaaaagtaggggagacaaatataaatacaatagttcctaggattactctcaaaataactatatcaattatttactttgctcttctattttttaaaatatgtacatgtttaaacaatcaaaagtgtacaatattaaattatcatttccagttctagtgctatattggtagtagttgactaaatgaaaatacgcttgtaacaagttttttcaatactcgtggggccacaacagagagaaattggatcaccaattccaacagacaatgcaagttggcggggccccaacatagagaaattggatcaccaatttcaacagacaatgcaagttggggtggggcccaacacagaagctggcgaaaagtcagcatacaaaaatgtgcaagttggcggggccacaacagagagaaataggatcaccaattccaacaaacaatgcaagttggcggggccccaacatagagaaattggaaccccaatttctacagacaatgcaagttggggtaggacatcgataaaaaaatactttttctttagaaattagtatttcttatgcatgagttttactcatgtattcattttttaagtagacattagctacagctaatgataaagaaccactacataataaatcattagtggttctttatcatttctatctcactcttttactggaagaaaaagtttacgtttgtagaacatgccacaataccaaaaataattaagaaaaataagacgataagcatgatgacacttttcaaacaacctctatcagtttcttccgattttctttgttgaacctttttataatcttcaagtagttttgtcgcttttttatttatatgtttattcatgatgttgactccttataatatatgtttaattcattaaaatagttgaaaacatgacttgaaataaagatataaagctaaagtaaggatgttcaattgtttcaaattttatgaaagtataacgttaaatatgttaatttgatgatgatatttgctttttattttccaaatggaatttacttaaactgatgcattaaaatattaatgaagcactagaatacataaatgaatagtaatggtgcacagtatagaataattaaggctatattaagtataaatatcgttaactgtaagctatctttagttttaatataaactattaggataatcgacgtaagaagaatcatatatattaatgatgaagaagtccatacaaaatccgcatcatttgttgttaataatgggactataattaatccgaaattaatcatgcatgctatatatactataatgttatacacaatgttaatttttgttcaccaccttatacttctattttaaaaacttctttataatgatatattgtttaatgttgaaataattagattatctaattttcatttgctttacatgtaaaaggctatatatagtatgctctttatgattctaaatgctttttaatatttaatgctcatcaacatttggattttgaatattcaattcaaaaactttattagctacgtcaattgtaaaatcagaaccatagttgacatgagctacttttaattttccatctaaataatagattgcgattgcaacatcgtaaaattcgtcaatgacaaataaactcttttcgtttgttacaacctcatgctctcctgagtatacaacgttaatttcccaatcattaaaaaccatttgttaacctccttgaacatttaaattgattcaacttaagtttaacttattcatacaacttcgtacaatatctagatgaacattaattgtatttctagaaatctttttcaattatatgtactaattatacttttaaacttcttatttcagtatagttttaaaacgattttaaaataattctgcaaatatattaacacataatgtgttcaaaaagttttgaacaatttcaaaacttttatataaagggtttgacaacatggaattcaaatttcttattttaaaaatcacctcatatagtgtcatgtttagtctaatttttaagtcaggaaagcaaatcaagtacatagtttaaattaaaaatatcataagttaattaaactaaattaagtataaaaattagccgaaaaacatcatttctgaagttatcggctaaagttataaattatatttatttgtacatgaacaaataatttacattaatttgtcatttcttctttttcccaatcgattttatatctttctgaagaacgatctgtccatttatctttagtattggtacctttccaatttgttgaagtccaatgcaattggtagtcatcacgaactcgttcgtatattacatctatatttgtttgttgtttggatgcttttctatccatagtaataactgtagcgaagtctggtgaaaaccctgaagataatagagaacttgctttgttaggatcaaggaagttctctgctgctttcatagaaccatttctagttttcatgaaaagttgattgccatataccgggttccaagaatctctatcatatggtccccaattttgattcaccatattgttaaatatcactttccagcctacttttttatcagttgggctctctaaaattgttttgaaatcaggttgaacatatttcagtgtatgaccaatcgaaacatttgcaccaataaggccgccaatttttcctgtatcatcaccagtaacattaccgttgaatccataagttaaagtactcatatactcttttgtatcaatcgaatttcttggatagtaatcagatatttgagctacttcattatcaggtagttgcaactgtaccttaaaggctgaaggccaggctaaaccacttttgttagcaccttcttcgctataaactctatattgaccagcaatggtacctttcgttctaataactagcagttttttattgtgatttttatcatcgataaaactataaaatacttttttgtgcatgccattttctttatcataagtgactaaatcacctgtttttactgtagtattgcttccaatatctgtagtaccggttttaatattaatatcagaatctgcggcattagcgacaggattcattaatatggaacctagcaatagtgttgttgttactgagctgactatacgtgttttcattttcatcatccttctatttttttaaacgatttgaggaaacaataatcaatatgtcaatttagaatattgcagttgagacatatcaaatatttataatcgtttatattagtatatttaatatagcaactgataaattactgagtgatgatgagtgattattttaagaatatgtttttaacttttatttaaaatttgaaaggaagcatttcaatttcgagggttagtcaaagttgaataaattctttatgaaacaaggaaaagacatagctaattttattaattaatttctttaaaactaattatttgtttgatttaaaaatgtaatcgattacaatataaaaatacaaatatcttagaattaaatcaattaattaactattaaataaaaattaactatatattaactactgtaaattaataaatagaaatagagaaaaagggtattaattatgtttggaatttcgtcgggaataaattttgccattacatagaaatatctaatagataacgaaaaagtatcgtatgtatttttaatatagtgtaaaatattatatgtaaaataaaatgtaggtttttagttagaggcattataagaaaattttgagtataggttagcttttaattatgaatcttattgaaatttgattaataaaaatatgataggggattaaaatgaaactattttatatcgtatttcttattattatatggctgaatatatttttaggaaatgaaatcatccatacactgactgttttaataacaacattgtatattgttaattcaagaaaggggattaaaaatgacagagttgaataatattataaactctcttcaatctttgtttgagtctgaatcaggctataaaatttcgaaaaattcaggagttccatatcaaacagtacaagatttaagaaatgggaaaaccaaactagaagatgctagatttagaacgattattaaactttatagttactatgtctcattaaaagaacattaatcatgggacaataaagtattgctataataattgaatcattaaatgaaggaatagagcctaagacataataaatcaatgtcttaggctctacaatattatattggtagtagttgaccgaatgaaaatgcccatgtaacaagcatttttcaattataggcggggccccaacatagagaaattcaaaaagaaattctacagacaatgcaagttgggatggggccccaacacataagctgacgaaaagtcagcttacaataatgtgcaagttggggatgggccccaacacagagaaattcaaaaagaaattctacagacaatgcaagttggcggggccccaacatagaagctggcggaaagtcagcttacaataatgtgcaagttggggagtgacaacgaaataaattttataaaataccatttctatcacattcctactcccaattccatttaaatttatagaaaattttacctattatatacatcatacactttaaaaattatcatttaaataatctgatttggaattaaagtgcatgaagtataagtcaccttcatatactaatcaaagaggacgtcaacagttattttattaggatttttaacataaacatttgctagatctgaatgtaatcttttgcttaaatcaatagtgtagttattaccgccaccggtgatcttaagcttacctttattacgattttcgttatataatattttattttttattaacgcttctcgtgcacggaaatcgatttctttcaatgttaatactggtttattgccttggtatattttatgcgcaccaataatcgtttgtagtttatctttgtattgcacaaaaagattataagttttatcagaaggttttgcggctggtgtaacgccacctgtaaatgtctctctataagaccaccataactgatcagtatctttgtcttttagtccaaacacatctacgtaacgatcttttaactgattaatatttccccaactttcagcgccccataaagatatatgtgctgaccatgaatatctcttaagttcaacataaatgtttccattatcatattgatatagccatttatttgaaaatgaaaaatgaggctgtgtgtaatatttaattaattcattgatgttagtttcatcttgaccaatactataagctttagcttcagagtaaaaactaaatactggtttttgattttgaggtaatacagtacctaatagtaataatgttgtcgttaaaattatatttttcgtgatgttcttactcattagaacatctcctttcagaggaatcatgatacgaggaataagaaatttaaatgtgagcgaagtcaatatagtatttgcgattatttttattaactccattattattgttagtttgatttttcgaggataacttcaatttttgcattttgaggttttttaacatatctatttgcatcagttgatggcaaccttttacttaaatctattgtgtagttattgtctgcacctgttattttaatttgtcctttattataagaattattatataattttttacttttaattaatgtttgacgaatacgaaaatctaattcttttaaagttaaaacaggcttattgccttcataaactggaaatccgccagtaaacgtttctgctttatctttatatgttacattcagtttatagtgtttatcgttagatgttgctgcaggagtaacaccaccagtaaacgtttcttgagataatgcaaaagaatcaatggtttcttggtcttttatgccaaaaatatcaacgcttttatttcttaattggttgatattgccccaactttcaggtccataaacttgaatatgactataccaagaaaactgtaacaacgttgcatgaatcgtaccgttatctttttgccataacgtactgtttgagaaggttaaatatttttgtgagtaatatttagttaactcatttacgttagtttcgttttgatttatataataagctttcgcttcagatgaagaattgataggtgtattaggaaattgtgtagatgctgtacctaatagtaacaatgttgttgataaaataatttttttcgtgatgttattgttcattcgaatttctcctttgagtattgttggaatgtttaattataaaaaggggttaattagataattgaaattatccgcatttacaaaaggtaataggttagttagatttttcgagtatgacttcaatttgtgcatttttaggatttttaacataacggtttgtgtcagttaattttaactttttacttaaatcaatcgtgtaattatttccatcagcagttatcttaatttgacctttattaaattctccgttatataactttttattctttattaatgtttgacgaatacggaagtctaattcttttagagttaatactggtttatttcctttgtaaaattcatgtccaccgatgatagtttgttgtttatcactatattttaaaaatagtctataaggtttatcagatgaagtagctgctggcgtaacaccaccagtaaatgtttcatcataagtccagtaaccttcaactgtgtcctcatctttagttccaaatatatcaacgtatttatttcttaactgattaatgtttccccaactctcggatccaaacacttgaatatgactataccaaacccacgtttgcaatgttgcatgaatgctaccattgggcttttgccataaccatttatttgatagtgataaatgaggctgtgtataatactttattaactcattgatattagtctctttttcactgatattataggcttttgcttcagatgaaaaactgattggtgttttaggaagttgtgtagatgtggttcctaaaagtaacaatgctgttgataaaactaatttattcatgatgttctttttcatatgaaaatctcctttgcgtgaattacccaaagtatataagctattacaccgattcggaattaaataaaagctaaaactatgttaaataaacttaaacagttagtagtgttatttaagcaaaacttatcatttttaagttttggacagaaacagtacctaataaagtaggctggagtatatattaaaaacgacacgttagaattattctctaatcaattgcattaaattgtttgataattgaattttctaactacttgaaaaatagttatactttaaatgtagtacttattttaattatttcctactacttaaatttaatattaataaaatgttcatttaattattgataaaatattacaaattttaatagtaggttgtgtttattctgtatgcgcttacaatttaggtgtaactaaaataaaaggagttgttattaatgaaaaatttacgaaacagaagttttttaactttattagacttttcacgacaagaggtagaattcttattaacactctccgaggatttaaaacgtgctaaatatattggcactgaaaagcctatgttaaaaaataaaaatattgcactgttatttgaaaaagattctacaagaacacgatgtgcatttgaagttgcagcgcatgatcaaggtgcaaatgtaacttatttaggcccaactggatcacaaatgggtaaaaaagaaacaactaaagatactgcacgtgtgcttggtggaatgtatgatggcattgaataccgtggtttttcacaaagaacagtagaaactttagctgaatattcaggcgtaccggtgtggaatggtttaactgatgaagatcatcctactcaagttcttgctgatttcttaacagcaaaagaagtcttaaaaaaagattatgcagatattaactttacatatgttggagatggtcgtaataacgttgcaaatgcattaatgcaaggtgctgccattatgggtatgaacttccatttagtttgtccaaaagaattaaatccaacagatgaattattaaatcgctgtaaaaatattgccgctgaaaatggtggcaacatattaatcacagatgatattgaccaaggtgtaaaaggttcggatgtaatttacactgatgtttgggtatcaatgggtgaacctgatgaagtatggaaagaacgacttgaattattgaaaccatatcaagtaaataaagaaatgatggataaaactggtaatccaaatgttatttttgagcattgcttaccatctttccataatgctgatacgaaaattggtcaacaaatttttgaaaaatatggaattcgagaaatggaagttacagatgaagtattcgaaagtaaagcttcagttgtattccaagaagctgagaacagaatgcatacaatcaaagcagtgatggttgctacattgggtgaattttaaatgatataaggaagtgaatatgatggcgaaaatagtagtagcattaggtggtaatgctttaggaaaatcacctcaagaacaactcgagcttgttaaaaatactgcgaaatcattagtaggattaataacaaaaggacatgagattgttattagtcatggtaatggaccacaggttggaagcattaatttgggacttaactatgctgcagaacataaccaaggtccggcatttccatttgctgaatgtggcgcaatgagtcaagcttacatcggctatcaattacaagaaagcttacaaaatgaattgcattctattggaatagataaacaagtggtaacactagtgacacaagttgaagttgatgaaaatgatccggcatttaacaatccttcaaaaccaattgggttattttacaacaaagaagaagctaaacaaattcaaaaagaaaaaggatttatatttgttgaagatgctggaagaggatatagacgtgttgttccttcaccacaacccatctctattattgaattagagagtattaaaacacttattaaaaatgatacactcgttattgctgctggcggtggaggtataccagtaattagagagcaacatgatggttttaaaggtattgatgcagttatagacaaagataaaacaagtgcattgttgggtgctaatattcaatgcgatcaattgattattttaacagcaattgattatgtatatattaattttaacactgaaaaccaacagcctttgaaaacaacaaatgttgatgaattaaaacgatatatagacgaaaatcaatttgcaaaaggaagtatgttaccaaaaattgaagcagccatatcatttattgaaaacaatccaaaaggaagtgtgcttataacatcattaaatgaattagatgctgccttagagggtaaagtaggtactgtgattaaaaagtaattgaattgaaacgcttttcaattactatatgtcaaatgcatgatttttattatttatgtgcaccccctgaaaataatgcctctattttgatgcggggtgcactttcttaatttatatttataaaatctttaaggtagaaatgctaggttaaatgtcgaaggagatgaaaccgtggaaaatacaattaatgaaagtgaaaagaaaaaacgatttaaattaaaaatgccaggtgcatttatgattttattcattttaacggttgttgcagttatagcaacatgggttattcctgctggtgcatattctaaactttcttacgaaccttcatcccaagaactaaagatagttaaccctcataaccaagtgaaaaaggttccgggtacgcaacaggaactagacaaaatgggggttaaaattaagattgaacaatttaaatcaggtgcaattaataagccagtatcaattccgaatacttatgaaagattaaagcaacatccagctggaccagaacaaataacaagtagcatggttgaaggtacgatagaagcggtcgatatcatggtattcattcttgtactagggggacttattggcgtagttcaagccagtggttcttttgaatcgggattgttagctttaacgaagaaaacaaaagggcatgaatttatgctaattgtgtttgtatcaatactaatgattatcggcgggacgttatgtggtattgaagaagaagctgtagcattctatccgattttagtccctatatttatagcgttaggatacgattctatcgtttcagttggtgccatattccttgccagctctgtcggtagtacattttcaactattaacccgttctcggttgtaattgcctctaatgccgctggtacaacttttacggatggcttgtattggagaataggtgcttgtattgtcggtgcgatttttgttattagttatttatattggtactgtaaaaaaattaaaaacgatcctaaagcgtcatattcttatgaagacaaagatgcttttgaacagcaatggtctgtattaaaagatgacgatagtgcccattttactttgcgtaagaagataatccttacattatttgtactaccatttccaattatggtatggggagttatgacgcaaggttggtggttcccagttatggcttcagcatttttaatatttacaattataataatgtttattgctgggacaggtaaatctggattgggagaaaaaggaactgtagatgcatttgtcaatggcgcatcaagtttagtaggtgtatctttaattattggcttagctcgaggtattaatttagtgttgaatgaaggtatgatttcagatacaatcttacacttttcatcatctttagttcaacatatgagtggaccattatttatcatcgtattactatttattttcttctgtttaggttttatcgtgccatcatcttctggattagcggtattatcaatgcctatctttgcaccactagctgatacagtaggtataccaagattcgtcatcgttacgacatatcaatttggtcaatatgcgatgttattcttagcgccgactggacttgttatggccacactacaaatgttaaacatgcgatattcacattggttccgatttgtatggccggtagttgcttttgtattgattttcggtggcggagtactaattacgcaagtactaatttattcataatttgaaatgatatattataaaaatactaattgggttttatgcatctcgtaggtttgtagaaatactaaactaagcgaggtgcattattatttttgattaagaaaataatgacggtaatgataacactagtaagtaattgatacaatgctctatttaataatgatatttttaaaatttgtttttaatgtaatgttagatctatggtatattatatttatcgtggtaaatatgtatttgctgtaaacagtttttgtaacacatgacacatatggttgtgaaaatagcatatataaaggatggctataaatgacacatttgacaaaggttttagatacactaactggaatatgcgtagtattattatttagtaaatattttgtggcgtatgcaaatatggtgtttgattggaatttaagatggtatttgctagaaaacataccacatttgccaattatattatttattctgatgtttattttcggagtaccttctgaaatgataaaagataggcaaaggaaaaataacggtgtttaatttatcgatatttagaggtgataaaatttgtcaactattacaaagactaaaataaaaatctttattaattattttattggtatattagccttggcgtttgctgcttatatattatttaaataaaggttagagtgaaacgtgtttatgaactagacgttctagtatagttactacagctttagtcagaaggtatcattgataagatcatattaaatcaaagaggcattgatatacactaaaaagaggcaagattacctgcctctttttagttattaaatatacgtgttaattcttggtaatagtgttactgagacgcattacgaagaaatttatcttgattttccttttttaaaaagaagtgaagatatcctataaagactctaagtactattacagtggctaataacacttcgataaacaaaagacctttccaaatgtctggaaacataagtacaggcaaactgttctttaaagcagttgctgagattactaaagggaatgtgaaagctgaaaatacgggcgaaaaaggttcttttagtaatttaggcaattgtataatgatataaaaataaaatatttgagctaatattaaaaatataattacgataaaagcattcgccttaggaaaggctataacatatgctgcagcgactaaagaaaatggtgcacaaattgtcgatgtgttcggtttgattgacgtctgcaaaggaaatgcttttaatcgcttgaaaactataggtaagacaatacaagtagctacaaagccatatattactgttaattgacctatgaaaaaatatccgctaacgggtgccgtcaatcctgcgatagcaataccaataaaaagtacagtccacgaaggataaacattttcaagtgaaaaatcttttaaatattttattgaaaaaataatcatatgcgtcataattcccacaaggcataaaatccaaataggcgttattaagctattgataaaagttatgttactaaaaaatgtatttaaataagtagtacctaaaaagccagacatgaaaaatgttgtgaacactgatgaaactagaggactgtttaattgttctttcacattattaaaatatttgatcatagtacataaaaggtgaatccaaatcaagaaagcaaagattccgcaaacagcgtttaaagtaagagataagtcttttaatagattacccaggcctaataatcctaagactagtcctgacgttactagaggtgctttttgaagtctcatgatttacaacctttcttatgtgattttcttcactaattatatcatgatagctatggccaattaataagaagagtgtgtactattacgttattagagtatgtatattggattgatagacacataattgacatttaaatctcaaaattaatgatatttgaggtatgctttgcaacctaaatattggaatatgtggaaaagtaattatttaatttaaatgatgattgaagatttacaagggggtgtacaaaatgagaaatcaaattcaaaaactattagacagtgatttgagcagtttacatatatcgaaacaaacaggagttccacaaagcacaatacacagaatgagaaaaaatgaaagatcattagacaatatgtcattgaaaaacgctgaactactttataaatttgccaatagtatatttagcaatgaaaattaagaagaataattagtgagttaaataattaaaaaaccacgtctcgatggacgtggttattttttttagatgtatataattataggatttcgggcccctgaaaagtccctaaaattttgaatagtatcaaaatctataggaataatataataataaaaatctctacgcatgcaaatggtgagtgttaaaaatcttggtgtagtgttggtgtagttcaggtgcagtatagatgaaatttgagcacaaaattacttaattaaaaatgtataaacaagtgtcagacgcgtgtcaattgtgtgtcaaaaaattctataacgaataagcatgcttgttttaattactgtattttcggggcttatgcgggggacgttttggtgacgcatcatactatattactgaaattcaaaacaaaaagagccccgtaatcacggaactcttttgtttggtaatgcgtataaaaatacctataaacgtcctgggagggattcgaacccccgaccgatggcttagaaggccattgctctatccagctgagctaccaggacacgtttaacaacacaagaattattatatctaaatgaacttaaattagcaataccttgtaaataaaaaatgtttatatttttcactattatagagctatttatctaaaaaggttcaataagacttaaatacgaattcaggcaacttaattgtgttaaatacagttttgaatgcctaactgtatttcttttctctttaaaatacagttaagtacattataagatgttgtgcggataaacaaactaattgcatcaaatttattttaaaataacaacaacaaaacgttaagcgaataacatttcggtgatttaaaagctacgcacgtttttgttatcttcaaatttaaattttaaggagtgttttcaatggaaggtttatttaacgcaattaaagataccgtaactgcagcaattaataatgatggcgcaaaattaggcacaagcattgtgagcatcgttgaaaatggcgtaggtttattaggtaaattattcggattctaatatcaatatgttatgtaagtaatcaggattatttcaaaggtgagggagagatttaaatgactggactagcagaagcaatcgcaaatactgtgcaagctgcacaacaacatgatagtgtgaaattaggcacaagtatcgtagacatcgttgctaacggtgtgggtttactaggtaaattatttggattctaatataataactaatattctttaaaataaactgggtgagcatactttaatgttatgcactcagtttattttatttgcagaaatttgagcctctgttaagatttagatacatagacaatataggagatggggaaattgggatataaaaatattttgatagactttgatgatacaattgttgatttttatgatgcagaagaatgggcgttttactatatggcgaatgtttttaatcataaagcaacaaaggatgattttttaacatttaaaaaaatcaatcaccaacattgggaagcttttcaacaaaataaattaacgaagtctgaagtattatcagaacgatttgtgaattacttcaaacatcatcaaatggaagttgatgggcatcgtgcagatgtgttatttagaaatggattagcagaagctaaagttaaatactttgatcaaacattagaaacaattgtcgaattatcgaaaagacatgatttatatattgttactaatggtgtaaccgaaacgcaaaagagaaggttaaatcagacgccgttacataaatatattaaaaagatatttatatctgaggaaacaggatatcaaaaacctaatccggaattttttaattatgtttttaatgatattggtgaggatgaaagacagcactcgattatagttggagattctttaacatctgacattctaggtggaatcaatgcgggtatagctacttgctggtttaattttagagggtttgatcataatccaggaattatacctgattatgaaattaattcatggaaacaactaaatgatattgtacgttaagacaaataatttgaaaaagatttacttatattagcttaagaaagtaattgtaaaaaagacactacgaaaagatgcattttcatgctcgtagtgtcgaatattattgtcttatggtttccacaataagacatcatgtccctctatatttttagcttccacatctgtaaatccatgatgtaaaaagaaatccttagaatcatttctgccaatggctttaattggcatgttgaaactctttgcaaaatcaatcaattctgaagcgtaccctctgttttgatattttggtaatacttctaacttccataataatatataatcttcaaaatctgggaagtagatttcttcgacatcacctttttttagtaatgccattctagctcctaattgatctccgacaaatatgccataaaatggtgaatctgaacttgcatcaatcatttgaccgtttaactcattgaccatgtataagtctttgttgccaaacgctctaaagttttcgaataattcgtcagttttgtaattaatttcaagacgtttgatttcactcatatttatctaccccttatttgtttactactattattatacattaaaccacttgtgtttttcattgatttgaaaatgtaaaacaatgaatattataaattttccatgattaaattgattttcaagccgtaaaattgtcaatcaccggtatagactttatactatagtttgtaatcgcgtacttaaggagaaaaaacatggactgtaaagtagttagtttaaatgaaaaagatcagtttataccaaaaataaagagcagtgaccctgtaataacaggattatttcaatatgatgcagctcaacaaactagttttgaaaaaaggatgtctaaagaaaataatggaagagaagcggcattagcgaatgttattcgtgaatatatgagtgatttaaagctttcaagtgaacaagaattaaacatacaacatttagctaatggttcaaaagttgtgattggtggacaacaagcagggcttttcgggggaccattgtatacattccataaaatattttcaatcattactttatctaaggaattaacggatacacataagcaacaagtagtaccagttttttggattgcaggagaagatcatgatttcgatgaagtgaatcatacatttgtttataacgaaaatcatgggtcgctgcataaggttaaatatcatacaatggagatgccagagacgactgtctctagatattatcctgataaggctgaattgaaacaaactttaaaaacgatgttcattcatatgaaagaaactgttcatacacaaggtctactggagatttgtgacagaattattgaccaatatgactcgtggactgatatgtttaaagcactactgcatgaaacatttaaagcatatggcgttctatttatagatgcgcagtttgagccgttaagaaaaatggaagcgcctatgtttaaaaagattttgaaaaaacatcagttgcttgatgatgcttttagagcaacacaacaacgtactcaaaatcaaggcttgaatgcgatgatacaaacagatacaaatgttcatttattcttacatgatgaaaatatgcgtcaattagtttcgtatgatggtaaacattttaaattaaataaaacagataagacatatataaaggaagaaattataaatattgcggaaaatcaacctgaattattttctaataatgtagtgacaagaccattaatggaagaatggttatttaacacggtggcatttgttggaggaccgagtgaaattaagtactgggctgaactaaaagatgtatttgaactatttgatgttgaaatgcctatcgtgatgccaaggcttagaattacttatttaaatgaccgtattgaaaaattactttcgaaatacaatattccattagaaaaagtgttagtcgatggtgttgaaggagaaagaagtaagtttattagagaacaagcatcacatcaatttattgaaaaggtagaaggtatgattgaacaacagcgtcgtctaaaccaagacttattagatgaagtggcggggaatcaaaataatattaaccttgtgaataaaaataatgaaattcatatacaacagtatgattatttgttaaaacgttatcttttaaacattgaaagagaaaacgacatcagtatgaagcaatttagagaaattcaagaaacactccatccaatgggaggattacaagaaagaatatggaatccacttcaaattttgaatgattttgggacagatgtgttcaagccctccacctatccaccactttcttacacttttgatcatattattataaaaccttaatataccaagggtttagcccgatttatcttaatgataaatcgggcatttttttgttttttaaaataaatttcacaaattttgtataaatagtggtggatagtggggagatgtggtaaattatatataaggtgaggtgataaaaaatgttcatgggagaatacgatcatcaattagatacaaaaggacgtatgattataccgtccaagtttcgttatgacttaaatgagcgttttattatcacaagaggccttgataaatgtttattcggttacactctagacgaatggcaacagattgaagagaaaatgaaaaccttacctatgacaaaaaaagacgcacgtaagtttatgcgtatgttcttctctggtgctgttgaagtagaacttgataagcaagggcgtattaacatccctcaaaacttgaggaaatacgctaatttaactaaagaatgtacagtaatcggtgtttcaaatcgtattgagatttgggatagagaaacttggaatgatttctatgaagaatctgaagaaagtttcgaagatattgctgaagatttaatagattttgatttttaaaatggaggaattgaagtgtttcatcatatcagcgttatgttaaacgaaaccattgattatttaaatgtaaaagaaaatggtgtgtacattgactgtacgctaggtggagcgggacatgccctttatttactaaatcaattaaatgacgacggaagattaatagcaatcgatcaagaccaaactgcaattgataatgctaaagaggtattaaaggatcatttgcataaggtgacttttgttcatagcaacttccgtgaattaactcaaatattaaaagacttaaacattgaaaaagtagatggaatttattacgacttgggtgtttcaagcccacaactcgacattccagaacgaggattcagttatcaccatgacgcaacattagacatgcgtatggaccaaacacaagaactaacagcatatgaaattgttaacaattggtcatatgaagcgttagtgaagattttttatcgctatggcgaggagaaattttcaaaacagatagctcgaagaatcgaagcacatcgcgaacaacaaccaataacaacaacattagaattagttgacattataaaagaaggtattcctgcgaaagcaagaagaaaaggcggacatcctgcaaaacgagtatttcaagcactacgaattgcagtaaacgatgaattgtcagcttttgaagattcaatagaacaagcgattgaattagtgaaagtagacggcaggatttcggtaatcactttccattctttagaagatcgtttatgtaaacaggtgttccaagaatatgaaaaaggtccagaggtaccaagaggattaccagttataccagaagcatatacacctaagttaaaacgtgttaatcgtaaaccgattaccgctacagaagaagatttagatgacaataacagagcacgaagcgcgaaattacgtgtagctgaaatacttaaataaggagcaatttataatggctgtagaaaaagtgtaccaaccatatgacgaacaagtttataatagtataccgaagcaacaaccacaaactaagcccgaaaagaagactgtttcgagaaaagtggttgtacaattaactaaatttgaaaaagttttatacataactttgattactgtaattgctatgttaagtatttatatgctatctttaaaaatggatgcgtatgatacgcgaggaaagattgcagatttagattataaaatagataaacaatcaagtgaaaacagtgctttacaatctgaaatcaaaaagaattcttcttatgaacgcatatacgaaaaggctaagaaacaggggatgagccttgagaacgataatgtaaaggtagtgcgtagtaatggcgaagcaaaaaattaaaattaaaaaaaataaaataggggcagtcctacttgttggtttattcggactgctcttttttatattggttttaagaatttcatatatcatgattactggacattctaatggtcaagatttagtcatgaaggcaaatgaaaagtatttagttaagaatgcacaacaaccagaacgaggaaagatatatgatcgtaatggtaaagtgctagcagaagatgtagaaagatataaacttgttgcagtaatagataaaaaggcgagtgccaattctaaaaagcctaggcatgtagttgataaaaaagagactgcaaagaaattatctacagtcattgatatgaagccagaggaaattgaaaagagacttagtcaaaagaaagctttccaaattgaatttggacgcaaaggaacaaatttaacgtatcaggataaattgaaaatagagaaaatgaatttgcctggtatttctttattgcctgaaacagaacgcttttatccaaatggcaattttgcatcacacttaattggtagagctcagaaaaatccggatactggtgaacttaaaggtgcgcttggagttgaaaagatttttgatagttatttaagtggatctaaaggatcattgagatatattcatgatatttggggatatattgcaccaaatactaaaaaagagaagcagcctaaacgtggtgatgatgtccatttaacaatcgattcaaatattcaagtatttgttgaagaagctttagatggcatggttgaaagataccagccgaaagatttatttgcggttgtcatggatgctaaaactggagaaattttagcatacagtcagcgaccaacatttaatcctgaaactggtaaagactttggtaaaaagtgggcaaatgacctttatcaaaacacatacgagcctggatcaacatttaaatcatatgggttagcagctgctattcaagaaggtgtttttgatcctgataagaaatataaatctggacatagagatattatgggttcacgtatttcagactggaatagagtcggttggggtgaaatcccaatgtcactcggatttacttattcatctaatacattgatgatgcatttacaagatttagttggtgcagacaaaatgaaatcttggtatgaacgatttggatttggaaaatcaactaaaggtatgtttgatggagaagcacctggtcaaattggatggagtaatgagttacaacaaaaaacgtcatcatttggtcaatcgacaactgtaacacctgttcaaatgttacaggcgcaatcagcgttctttaatgatggtaatatgttaaaaccatggtttgtgaatagcgttgaaaatcctgttagtaaaagacaattttataaagggcaaaaacaaatcgcaggcaagccaataacaaaagatactgctgaaaaagttgaaaagcaattggatttagttgtgaatagtaagaagagtcacgctgcaaactatcgtattgatggttatgaggtcgaaggtaagactggtacagcacaagtcgctgcacctaatggtggtggatacgttaaaggtccaaacccatattttgtaagttttatgggtgacgcgccgaaaaaaaatcctaaagttattgtatacgctggtatgagcttggcacaaaaaaatgaccaagaagcttatgaattaggtgttagtaaagcgtttaaaccaataatggaaaatactttgaaatatttaaatgtaggtaaatcaaaagatgacacatctaatgcagagtatagtaaagtgccagatgttgaaggtcaagacaaacaaaaagctattgataatatgagtgcaaaatcattagaaccagttactatcggttctggcacacaaataaaagcacaatctataaaagcagggaataaagtcttacctcatagtaaagtactgttattaacagacggagacataactatgcctgacatgtcaggatggacgaaagaagatgtcattgcttttgaaaacctaacaaatattaaagtaaatttaaaaggtagcggttttgtgtcccaccaatcaattagtaagggacaaaaacttactgaaaaagataaaatagacgtagaattttcatcagagaatgtagacagcaattcgacgaataattctgattcaaattcagatgataagaagaaatctgacagtaaaactgacaaggataagtcggactaacaagaatggctacattaaataagggtgtattgtcactatttgtttttactaaagtaatgctgtgatagaaaacaacatcttcatttaatctttataaataagtgttgatagagaattttaaggtagacgaggtcagattaacttgtttgttataggcaaactttttatactggcctcttatgccgtaaaaaagaaaaattataaattttgattacaactttgtttatttaattgaaaaattgataatatattagtggttaaaaaagtctggattaagaagaggagatagttatgatttttgtatatgcgttattagcgctagtgattacatttgttttggtacctgttttaatacctacattaaaaaggatgaaatttggtcaaagtattcgagaagaaggtccacaaagccatatgaagaagactggtacaccaacgatgggtggactaacatttctattaagtattgtgataacgtctttggtggctattatatttgtagatcaagctaatccaatcatactgttattatttgtgacgattggttttgggttaattggttttatagatgattatattattgttgttaaaaagaataaccaaggtttaacaagtaaacagaagtttttggcgcaaattggtattgcgattatattctttgttttaagtaatgtgtttcatttggtgaatttttctacgagcatacatattccatttacgaatgtagcaatcccactatcatttgcatatgttattttcattgttttttggcaagtaggtttttctaatgcggtaaatttaacagatggtttagatggattagcaactggactgtcaattatcggatttacaatgtatgccatcatgagctttgtgttaggagaaacggcaattggtattttctgtatcattatgttgtttgcacttttaggatttttaccatataacattaaccctgctaaagtgtttatgggagatacaggtagcttagctttaggtggtatatttgctaccatttcaatcatgcttaatcaggaattatcattaatttttataggtttagtattcgtaattgaaacattatctgttatgttacaagtcgctagctttaaattgactggaaagcgtatatttaaaatgagtccgattcatcatcattttgaattgataggatggagcgaatggaaagtagttacagtattttgggctgttggtctgatttcaggtttaatcggtttatggattggagtgcattaagatgcttaattatacagggttagaaaataaaaatgtattagttgtcggattggcaaaaagtggttatgaagcagctaaattattaagtaaattaggtgcgaatgtaactgtcaatgatggaaaagacttatcacaagatgctcatgcaaaagatttagaatctatgggcatttctgttgtaagtggaagtcatccattaacgttgcttgataataatccaataattgttaaaaatcctggaataccttatacagtatctattattgatgaagcagtgaaacgaggtttgaaaattttaacagaagttgagttaagttatctaatctctgaagcaccaatcatagctgtaacgggtacaaatggtaaaacgacagttacttctctaattggagatatgtttaaaaaaagtcgcttaactggaagattatccggcaatattggttatgttgcatctaaagtagcacaagaagtaaagcctacagattatttagttacagagttgtcgtcattccagttacttggaatcgaaaagtataaaccacacattgctataattactaacatttattcggcgcatctagattaccatgaaaatttagaaaactatcaaaatgctaaaaagcaaatatataaaaatcaaacggaagaagattatttgatttgtaattatcatcaaagacaagtgatagagtcggaagaattaaaagctaagacattgtatttctcaactcaacaagaagttgatggtatttatattaaagatggttttatcgtttataaaggtgttcgtattattaacactgaagatttagtattgcctggtgaacataatttagaaaatatattagcagctgtgcttgcttgtattttagctggtgtacctattaaagcaattattgatagtttaactacattttcaggaatagagcatagattgcaatatgttggtactaatagaactaataaatattataatgattccaaagcaacaaacacgctagcaacacagtttgccttaaattcatttaatcaaccaatcatttggttatgtggtggtttggatcgagggaatgaatttgacgaactcattccttatatggaaaatgttcgcgcgatggttgtattcggacaaacgaaagctaagtttgctaaactaggtaatagtcaagggaaatcggtcattgaagcgaacaatgtcgaagacgctgttgataaagtacaagatattatagaaccaaatgatgttgtattattgtcacctgcttgtgcgagttgggatcaatatagtacttttgaagagcgtggagagaaatttattgaaagattccgtgcccatttaccatcttattaaagggtgtgagtattgatggatgataaaacgaagaacgatcaacaagaatcaaatgaagataaagatgaattagaattatttacgaggaatacatctaagaaaagacggcaaagaaaaagatcaaaggctacacatttttctaatcaaaataaagatgatacatctcaacaagctgattttgatgaagaaatttacttgataaataaagacttcaaaaaagaagaaagcaatgataaaaataatgattctgcttctagtcatgcgaatgataataatatcgatgattctacagactctaatattgaaaatgaggattatagatataatcaagaaattgacgaccaaaatgaatcgaatgtaatttcagtcgacaacgaacaacctcaatcagctcctaaagaacaaaatagcgactcgattgatgaggaaacagtaacgaaaaaagaacgaaaaagtaaagtaacacaattaaagccattaacacttgaagaaaagcggaagttaagacgtaagcgacaaaagcgaatccaatacagtgttattacaatattggtattgttgattgctgttatattaatttacatgttttcaccacttagtaaaattgcgcatgtaaatataaatggaaataatcacgttagtacttcaaagataaacaaagttttaggtgttaaaaatgattcaaggatgtatacgtttagtaaaaaaaatgctattaatgatctcgaagaggatccattaatcaaaagtgttgagatacacaagcaattaccaaacacattaaacgtagatatcacagaaaatgaaattattgctttagtgaaatataaaggtaaatatttacctttattagaaaatggtaaattgcttaaaggttcaaatgatgtcaaaattaatgatgcacctgtcatggatggtttcaaaggtacaaaagaagatgatatgattaaggcgttatctgaaatgacacctgaagttagacgatatattgccgaagtgacatacgccccaagtaaaaacaaacaaagcagaattgaattgtttacgacagatggacttcaagtaatcggtgatatttcgacgatatctaagaaaatgaaatattatccgcagatgtcacaatcattatcaagggatagttcgggtaaactaaaaacacgaggctatattgatttatcagtcggtgcttcatttatcccataccgtggaaacacgtctagtcaatcagaaagcgataaaaatgtgactaaatcatctcaagaggaaaatcaagcaaaagaagaattacaaagcgttttaaacaaaattaacaaacaatcaagtaagaataattaaaaaattttgatattgtctatgtttatagttcacaagccattcaacgtattgtaaactaaggatagtgtatttttttaatagtaatttgtcaggaggtgcctatctatggaagaacattactacgtaagtattgatattggatcatcaagcgtaaaaacaatagtaggcgagaaatttcacaatggtataaatgtgataggtacaggacaaacctacacgagcggtataaaaaatggtttaattgatgattttgatattgcgcgacaagcaatcaaagacacaattaaaaaggcatcaatcgcttcgggtgttgatattaaagaagttttcctgaaattacctatcattggaacggaagtttatgatgaatcaaatgaaatcgacttttatgaggatacagaaatcaacggttcacatatcgaaaaagtattagaaggtattagagaaaaaaatgatgtgcaagaaacagaagtaattaatgtgttcccgattcgttttatagtcgataaagaaaatgaggtttcagaccctaaagaattaattgccagacattcattaaaggttgaagcaggcgtaattgctattcaaaaatcgattttaattaatatgattaaatgcgtagaagcatgtggtgttgatgtattagatgtttactctgatgcatataactatggttcaatcctaacagctactgaaaaagagttaggtgcatgtgtcattgatattggtgaagacgttacgcaagttgctttttatgaacgcggtgaattagtagatgctgattctatcgaaatggcagggcgtgatattacagacgatattgcacaaggattaaacacttcttatgaaactgctgaaaaagttaaacaccaatatggtcatgcattctatgattctgcttcagatcaagatatcttcactgttgaacaggttgatagtgatgaaacagtacagtatactcaaaaagatttgagtgactttattgaagcgcgtgtagaagaaatattcttcgaagtatttgatgttttacaagatttaggattaacaaaagtaaatggtgggtttattgtaactggtggatctgcaaacttacttggcgtaaaagaattattatcagatatggtaagtgaaaaagttagaattcacacgccatcacaaatgggaattagaaaacctgaattttcttcagcaatttctacaatttctagtagtatcgcttttgatgagttattagattatgttacaattaattatcatgataatgaagaaactgaagaagatgttattgatgtgaaagacaaagataacgaatctaaattaggcggatttgattggtttaaacgtaaaacaaacaaaaaagatactcatgaaaatgaagtagagtcaacagatgaagaaatttatcaatcagaagataatcatcaggaacataaacagaatcatgaacatgttcaagacaaagataaagaagaaagtaaattcaaaaaactaatgaaatctctatttgaatgattattggccaataaaactaggaggaaatttaaatgttagaatttgaacaaggatttaatcatttagcgactttaaaggtcattggtgtaggtggtggcggtaacaacgccgtaaaccgaatgattgaccacggaatgaataatgttgaatttatcgctatcaacacagacggtcaagctttaaacttatctaaagctgaatctaaaatccaaatcggtgaaaaattaacacgtggtttaggagcaggagctaaccctgaaatcggtaaaaaagctgcagaggaatctcgtgaacaaattgaagatgcaatccaaggtgcagacatggtatttgttacttctggtatgggtggcggaactggtactggtgcagcaccagtcgttgctaaaattgcaaaagaaatgggcgcattaactgttggtgttgtaactcgtccatttagttttgaaggacgtaaacgtcaaactcaagctgctgctggagtagaagctatgaaagctgcagtagatacattaatcgttataccaaatgaccgtttattagatatcgttgacaaatctacgccaatgatggaagcatttaaagaagctgacaacgtgttacgccaaggtgtacaaggtatctcagacttaatcgctgtttctggtgaagtaaacttagactttgcagacgttaagacaattatgtctaaccaaggttctgcattaatgggtattggtgtttcttctggtgaaaatagagcggtagaagctgctaaaaaagcaatctcttctccattacttgaaacatctatcgttggtgcacaaggtgtgcttatgaatattactggtggcgagtcattgtcattatttgaagcacaagaggctgctgatattgtccaagatgctgcagatgaagacgttaatatgattttcggtacagttattaatcctgaattacaagatgagattgttgtaacagttattgcaactggttttgatgacaaaccaacatcgcatggtcgtaaatctggtagcactggattcggaacaagcgtaaatacttctagcaatgcaacttctaaagatgaatcattcacttcaaattcatcaaatgcacaagcaactgatagtgtaagtgaaagaacgcatacaactaaagaagatgatattccaagcttcattagaaatagagaagaaagacgttcaagaagaacaagacgttaatcggttaatatatacacaaataattcaacacaaatcatcagataacatatctgatgatttttttactaatttttagaacatgtagaaggacatttaagtttttcgaagttaataaaagtgtttaagtatcgtgtcaaaattaaatcaaaaattatttgcgcaacattttaactttaaacataaatgttatattatataattattaactttgtacagttagacgaagataatttaaatgaaatgatggtgacgatcgagtgaatgataattttaaaaagcaaccgcatcatttaatatatgaagaattattacaacaaggtattactctaggtattacaactagaggcgatggtttaagtgactatcctaaaaatgcttttaatatggcgagatatattgatgatcgcccatataatattactcaacatcaattgcaattagctgaagaaattgcgtttgatagaaaaaattgggtgtttcccatccaaacacatgaaaataaagtcgcttgtattacaaaggatgatataggcacaaatatagacactttaactgatgcgcttcatggtattgatgcgatgtacacatatgatagtaatgtcttattaacgatgtgttatgcagactgtgtaccagtatatttttatagtacaaaacatcattttattgcattggcgcatgcaggttggcgtggtacctatactgaaattgtaaaagaagtgctcaaacatgtgaactttgatttgaaagacttacatgtcgttattggaccatctacatcatcaagttatgaaattaatgatgatattaaaagtaaatttgaaacattgccaattgatagtgcaaactatattgaaactagaggacgagatcgtcatggtattgatttgaaaaaagccaatgctgcattattaaattattatggtgttcctaaagaaaatatttatacgacagcgtatgctacatctgaacatttagaattatttttctcttatcgattagaaaaaggtcaaacaggacgcatgttagcattcattggtcaacagtaaacaaggaggagatatgcttgcgtgtgaaagataatttacaacaaatctcaacacaaattaatgacaaaagtgaaaaaaataatttttcaacaaaaccaaacgtgattgcagttacaaaatatgttacaatagagcgagctaaagaagcgtatgaggctggaataagacattttggtgagaatagattggaaggcttttttcaaaagaaagaagcattaccatcagatgcggtgatccattttataggatcattacaatctcgaaaagttaagggcgttataaacgacgtagattatttccatgctttagatcgattgagcttagccaaagaaattaacaaacgtgcagaacataaaattaaatgtttcttgcaagtgaacgtttcgggagaagcttctaaacatggtattgctttagaagatgttgatcagtttatagatgatcttaaaaaatatgacaaaatcgaaattgtaggtttaatgacgatggcaccattgacagatgatgaagcatatattagatcgttatttaaacagttacgtttgaaaaaagaagaaatacaacgactcaatttagaatatgcgccttgtgatgaattatcaatgggaatgagtaatgactatcttattgcagttgaagaaggtgcgacgtttgttagaattgggactaaacttgtaggagaagaggagtgagccacttggctttaaaagatttatttagtggattttttgtaatagatgatgaagaggaagtagaagtacctgacaaacaacaacaggtaaatgaagcgccagcaaaagagcagtcacaacaaacaacaaaacaaaacgcaatcaaatcagtccctcagaaatctgcatcaagatatacaacaacgtcagaagaaaggaataaccgtatgtctaattattcaaaaaataattcacgtaatgttgtaactatgaacaatgctacaccaaacaatgcatcacaagaaagttcaaaaatgtgtttattcgaaccacgtgttttttcagatacacaagatattgctgatgagcttaaaaaccgccgtgcgacacttgtcaatttacaacgtattgataaagtatcagcgaaaagaattattgattttttaagcggtactgtttatgcaatcggtggagatatccaacgtgtaggtactgatattttcttatgtacgcctgataatgtggaagtagctggaagcattacagaccatattgaaaatatggaacattcattcgactaaggagttaacatatggatataaatgtgctagctacaatatttaaatttatcctttttgttgttgaaatttattatttcggcatgattatatatttctttacatcttgggtaccaagtattagagaaactaagataggttattttttagcgaaaatatatgaacctttcttacaaccatttagaaaagtaattccacctattggaattatcgacatatcatcaatcgctgcaattttcgttttagtattattccaaaaagggttactccaaatctttaattggattttaattcaattacaataaattaagtgacataacgaggcaagggtacatgatactttagcctcgtttttgatatgtatttttctgaatataagggcaatagatggtattttataatttttttaaggtagtgattaacatagatatttatcaacactttagacaggaagaatacgaattaattgatcagctaacggataaatgtgatcaagcggaacagcattatgcaccagtattaacgcattttttagatccaagagggcaatatatattggaagtgatttgtggcagttatgaagatttaaacgtatctttttatggtggacctaatgctgaaagaaaaagagcaatcatttcgccgaactattatgaacctaaagaaagcgactttgaattaactttaatggaaatagattatcctgaaaaattcgtcactttaaaacatcaacatattttagggacattaatgtctttaggtatcgaacgcgaacaagttggagatataattgtgaatgaacgaattcaatttgttttgacaagtagattggaatcatttattatgttagaattacaacgtattaaaggcgcatcagttaaactttatactattccagtaacagatatgatacaatctaatgagaattggaaaaatgaaagtgcaacagttagttctttaaggttagatgttgttattaaagaaatgatacgtaaatcacgtacgattgcgaaacaactaatcgaaaaaaaacgtgttaaagtgaatcacactattgttgattcagcagattttcaattacaagcaaatgatttaatatccatccaaggttttggtagagcacacattactgacttaggtggtaaaactaaaaaagataaaacgcacattacctatagaacattattcaaatagtaatgatttaaggaggataacaaatgccttttacaccaaatgaaattaagaataaagagttttcacgtgtaaagaatggtttagaacctactgaagttgctaattttttggagcaactaagcactgaaattgaacgtcttaaagaagataaaaaacaacttgaaaaagtaatcgaagagagagatactaatattaagtcttatcaagacgtgcatcaatctgtaagtgatgctttgatacaagctcaaaaagctggtgaagaaactaagcaagctgcagaaaaacaagctgaagcgattatagctaaggcagaagcgcaagctaatcaaatggttggtgacgcggtagaaaaagcacgccgtttagcattccagactgaagatatgaaacgtcaatcaaaagtatttagatcgcgtttccgtatgttagttgaagcgcaattagacttattaaaaaacgaagattgggattacttgttgaattatgatttagacgctgaacaagtgacgcttgaaaatattcatcatttgcatgaaaatgatttaaagccagatgaagttgcagcaaatgcacaaaataatgcatcaaatacatcagacaataatcaacaatccaatgattcagaaacaactaagaagtaggaattaaataaagacagacgcgtaatatacatttaacttttcacagcgaattaggtaatggtgagagcctagtaaaagcatgtatgttatatcactggctttttaatatttaaataatgtaatgagagaactctaagttgagttaataagggtggtaccgcgagcaatcgtcccttttaatttaacttagagttttttaaatttttaaggagtgaaaaaaatggattacaaagaaacgttattaatgcctaaaacagatttcccgatgcgaggtggtttaccaaacaaggagccgcaaattcaagaaaaatgggatgcagaagatcaataccataaagcgttagaaaaaaataaaggtaacgaaacattcattttacatgatggcccaccatacgcgaatggtaacttacatatgggacatgccttgaacaaaattttaaaagactttattgtacgttataaaactatgcaagggttctatgcaccatacgtaccaggttgggatacacatggtttaccaattgaacaagcattaacgaaaaaaggtgttgaccgaaagaaaatgtcaacagctgaattccgtgagaaatgtaaagaatttgctttagaacaaattgaattacagaaaaaagattttagacgtttaggtgttcgtggtgactttaatgatccatatattacattaaaacctgaatacgaagctgcacaaattcgtatttttggagaaatggcagataaaggtttaatttataaaggtaaaaagccagtttattggtctccttcaagtgagtcttcattagcagaagcagaaattgaatatcacgataaacgttcagcatcaatttacgttgcatttgacgttaaagatgacaaaggtgtcgtagatgcagatgctaaatttattatctggacaacaacgccatggacaattccatcaaatgttgcgattaccgttcatcctgaattaaaatatggtcaatacaatgtaggtggcgaaaaatatattattgcagaagccttatctgacgctgtagcagaagcactggattgggataaagcatcaatcaaattagaaaaagaatacacaggtaaagaattagagtatgttgtagcacaacatccattcttagacagagaatcgttagtgattaatggcgatcatgttactacagatgctggtacaggttgtgtacatacagcaccaggtcacggggaagatgactatattgttggtcaaaaatatgaattgccagtaattagtccaatcgatgataaaggtgtatttactgaagaaggcggccaatttgaagggatgttctatgataaagctaataaagccgttactgatttattaacagaaaaaggtgcactattaaaattagactttattacacatagctatccacacgactggagaacaaaaaaacctgtaatcttccgtgctacaccacaatggtttgcctcaatcagtaaagtaagacaagatattttagatgcaatcgaaaatacaaacttcaaagtaaattggggtaaaacacgtatttacaatatggttcgtgaccgtggcgaatgggttatttctcgtcaacgtgtgtggggtgtaccgttaccagtattttatgctgaaaatggcgaaattatcatgacgaaagaaacagtgaatcatgttgctgatttatttgcagaacacggttcaaatatttggtttgaaagagaagcgaaagacttactaccagaaggatttacacatccaggcagccctaacggtacatttactaaagaaacagacattatggacgtttggtttgattctggttcatcacaccgtggcgtgttggaaacaagaccggaattaagtttcccagcggatatgtatttagaaggtagtgaccaatatcgtggttggttcaactcttctatcacaacttcagttgctacaagaggagtatcaccttataaattcttactttctcatggttttgttatggacggtgaaggtaagaaaatgagtaaatctttaggtaatgtgattgtacctgaccaagtggttaaacaaaaaggtgctgatattgcgagactttgggtaagtagtacggactatttagctgatgttagaatttctgatgaaattttaaaacaaacatctgatgtttatcgtaaaatcagaaatacattaagatttatgttaggtaacattaacgatttcaatcctgacacagatagcattcctgaatcagagttattagaagtggatcgttacttgctaaatcgtttacgtgaatttactgcaagtacgattaacaactatgaaaactttgactacttaaatatttatcaagaagttcaaaactttatcaatgttgagttaagtaatttctatttggattacggtaaagatattttatatattgaacaacgtgattctcatatccgtcgtagtatgcaaacagtgttatatcaaattttagttgatatgacgaagttgttagcaccaatcttagtgcatacagctgaagaagtttggtctcatacaccacatgttaaagaagaaagtgttcacttagcagacatgcctaaagttgtagaagtagatcaagctttattggataaatggcgtacatttatgaatttacgtgatgatgtgaaccgtgcattagaaactgctcgtaatgaaaaagttattggtaaatcattagaagctaaagttacgattgctagtaacgataaatttaatgcatctgaattcttaacttcatttgatgcattacatcaattatttatcgtgtcacaagttaaagttgtagataagttagacgatcaggcaacagcttatgaacatggtgatattgtcatcgaacatgcagatggtgaaaaatgtgaaagatgttggaactattcagaggatcttggtgctgttgatgaattgacgcatctatgtccacgatgccaacaagttgtaaaatcacttgtataattgaaattgtataaagtactcatacagatgatataaattaaagctctcttcataatcatgttgtagtttttgttgacatgatgaagagagtttttttgtgaataaaaaaatgaccaagttaccggtcatatatgtaaaaaatgtgcgatttactaaaataaaaattattcaggaatggtacaaattctctgaggcatataaatgcgttatagttgctattctcaattatgttcgcgataattttaagtaaaagtaagcacagatattgaatttgataggagttaattgaatgtatcataacagtaacgcaaactttgtcaatggtatcactttaaatgtgagagataagaatgaattaaagccattttatgaggacatattaggattaaatattataaatgagacattaacatcgatacaatatgaagtaggtcaaaataatcatgtcattacacttgttgaattacaaaatggacgtgaacctttaatgtccgaagcgggactgtttcatatcgcaattaaactacctcaaattagtgatttagctaatttactaattcatttaagcgaatatgatattccagttaacggaggtatacagcctgcttcgttatcattattttttgaagacccagaaggaaacggttttaaattttatgttgataaagacgaagcgcaatggacgaggcaaaatgatttagtaaaaattgatattagaccattaaatgtaccgagattagtgagtcatgcaacaaaattgttatggttaggtattccagatgacgctattataggtgcattgcatattaagacaattcatttatcagaggtaaaagagtactacctcgattattttggattagagcaatcggcatatatggatgattattcaatatttttagcatcgaatggctattatcaacatttggccatgaatgattgggtatcagcaacgaaacgtgtagaaaattttgatacgtatggattagcaattgttgactttcattatcctgaaacaacacatttaaatttacaaggtccggatggtatctattatcgctttaatcatatcgaagttgaagattagtatatactttgaatggacgaaccatataatgaatcgtttttaatgatctttttatacaagttatgaaggaggctgggacataaatccctaaaaaacagcagtaagataattttcaattagaaaatatcttactgctgttctctatttatacaatacttcgtattgaatggcttcgctatgcccatctggcacattactgtaaaattctataaatagaatttttgatgatgggtcccttcctagggtgccgtctcagcctcggtcttcgactggcactgctccctcaggagtctcgccattaatactacgtattaacatgtaattttactttgaaatactttaaagcccaaattaatcaaaagctttctgaaccagaaacgaaaaaaatcaatagtcaaagaaaaattgatgtagagcctgtttttggatttgtgaaggctattttgggtttcactagaatgtcagttcgaggaataaataaagttaaacgagagctaggttttgtattaatggtacttaatataaggaaaatagcagctcaacgagctgtacattataaaatacatatcaaaaaagctgatttctatcaaataattaatagaaaacagcttttttaaattgcctaagaacttaatgtcccagcctctttcctaatttttaatgtcatcttaaatatgataaatgaataattaagttcatatttaatgtcaaaacatagtagtttatcaagtattgagttagtaacattagatttaatgtaatatgcttactttttttattagcaggtgtaagctataatataaagagttgtcttatggacgattgattggaggaacgaaaatgcacaaaaaatattttattggcacttccattttaatagcagtatttgtcgttatatttgaccaagttactaaatatattatagctactacaatgaaaattggagattcatttgaagtgataccgcactttttaaacataacatcacatcgaaataatggtgctgcatggggaatattgagtggaaaaatgacatttttctttattattaccattattatattaatagccttagtatatttctttattaaagatgctcaatataatttgtttatgcaagttgctattagtttactttttgcaggtgcacttggaaactttattgatagaattttaacaggagaagttgttgactttattgatacaaatatttttggttatgattttccaatatttaatatcgcagattcaagtttaacaattggtgtaatattaattattattgccttattaaaggatacttccaataaaaaggagaaggaggttaagtaatggagacttatgaatttaacattacagataaaaaacaaacaggtatgcgtgtagataagttgctgcctgaattaaatagtgattggtctcgtaaccagatacaagattggattaaagcaggtttagtcgttgcaaacgataaagttgttaaatctaattataaagtgaaacttaatgatcatatagttgtcactgaaaaagaagtggttgaagctgatattctacctgaaaatttaaatttagatatttattatgaagatgacgatgttgcagttgtatataaaccgaaaggcatggtagttcatccatcaccagggcattataccaatacattagttaatggtttaatgtatcaaattaaaaatttgtcaggtattaatggagaaattcgtccaggtattgttcaccgtatagatatggatacttctggtttattaatggttgctaaaaatgatattgctcatcgtgggcttgtagaacaattaatggataaatctgttaaaagaaaatatatcgctttagttcacgggaatattcctcatgattacggtacaatcgatgcgccaattggtagaaacaaaaatgatcgtcaatctatggctgttgttgatgatggtaaggaagcagtgacacattttaacgtactagaacattttaaagattatacgcttgttgaatgtcaacttgaaacaggacgtacgcatcaaatccgtgtgcacatgaaatatattggcttcccattagttggtgatccaaagtatggaccgaaaaagacattggatattggtggtcaagctctacatgctggacttattggattcgaacatccagtaacaggtgaatatattgaaagacatgctgaattaccacaagactttgaagatttattagatacaattcgaaaaagagatgcataattgtgtcgtgctataattacgataacattattatgtaaactataagtatttatcgttttcgtttttttaaaatgaaaacacattataaaatagattaaggttaacatttttactgagatcggttaatttttcaatatagattgacaaagcgcctgattagtattatccttataacagtttaagtacaacataaagagtctttaattgagcgtccagagagacgtcaaagacatgaaaatatagatatatactaaaatgatcataacactttcacatatgcaagaataagtagtaatactacgattcttctatgtaaataggctgattgtatatactaaacctcatgtcgatattaaagacatgaggttttttgtttctaaattttgaaagggtgagaatatgtctgaacgtatcataatggatgatgccgcaatacaacgtacagtgacgagaatcgctcatgaaattttggagtataacaaaggtactgataatttaattcttttaggtatcaaaacaagaggtgaatatttagcgaatcgtatacaagataaaattcatcaaattgagcaacaacgtatacctactggaacaattgatattacatactttagagatgatatagagcacatgtcatcacttacgacaaaagacgcaatagacatcgacacagatattacagataaagtagtcatcattattgacgatgtgctgtatactggtcgaacggttcgtgcttcacttgatgctattttgctaaatgctagacctattaaaattggtttagctgctttggttgatcgaggacatcgtgagttaccaattcgagcagattttgttggtaaaaatatacctacttctaaagaggaaacggtaagtgtctatttagaagaaatggatcaaagaaatgcagttataattaaataataccccttttaattcagtacgagagactgaaaaaggtgggggagttgaatgataaataagttttcatatgcttgtttatctaataataccctcatgttcgacaactataagtcaatttctatggacgaaaatgacttgtagcaacttgtcacactttttgtctctttacatatactgatgtaaagagatttttttattatcggaggaaatgaatattatgcaaaatgatgaaatgtttgaacgaacagtaaaacctgtactagatgtaaatgaaaaaccacaaccagcgcaatgggcatttttaagcttacaacatttatttgcgatgtttggcgcaacagtactagtaccattcttaacaggattaccaatatccgcagcgttactagcttcgggaatcggtacattactttatatcttaataacgaaggcgcaaataccagcatacttgggatctagctttgcatttatcacgccaattatcacgggattaagtacgcatagcttaggagacatgcttgtagcattattcatgagtggtgttatgtacgtcatcatcgggattctaatcaaattaagtgggacagcatggttaatgaaattattaccaccagttgttgttggaccagtcatcatggtaattggtttaagcttagcgcctactgcagtcaatatggcaatgtatgaaaatcctggagatatgaaaggttacaatatcagtttcttaattgttgcaatgataaccttgcttgtaacaatagtcgttcaaggattttttaaaggattcctatctttaattccagtacttgtaggtattatcgtaggttatgtggtagcgatttttatggggattgtgaaatttgatgcaattatgtcagcaaaatggatagatttccctcatatttatctgccatttaaagattatgtaccttcatttcacttaggacttgtactggtaatgattccgattgtgtttgtaacagtaagtgaacatattgggcaccaaatggtattgaataaaatcgtaggtagaaacttctttgaaaagccaggacttgataaatcaatcattggtgatggtgtttctacaatgtttgccagtattattggtggaccaccaagtacaacatacggtgaaaatatcggtgtattagcgattaccagaatatacagtatttacgtcattggtggtgcagcagttatagcaattgttttagcattcattggtaagttcactgcattaatttcttctatacctacaccagttatgggaggagtatctatattacttttcggtattattgcagcaagtggcttaagaatgctagttgaaagcaaagtagattttgcgaacaatcgaaatttagttatagcttcagtaattttagttgtaggtatcggtaatttagtatttaacttaaaagaaattggtatcaaccttcaaattgaggggatggcattagctgcactttcaggaattattttgaacttaatcttacctaaagagaaaaaacaaaacaattaagatttacaaattaaggagggcgcttttatgaatcatttattatcaatggaacatttatctacagatcaaatatacaaacttatccaaaaggcaagtcaatttaaatctggtgaacgtcaactaccaaactttgaagggaaatatgtcgcaaatttattctttgaaaattctactcgaacaaaatgtagttttgaaatggcagaacttaagctagggttaaaaacgattagctttgaaacatcaacatcatctgtttcaaaaggtgaatctttatatgacacatgtaaaactttagaaagtattggctgtgatttattagtcattagacatccgtttaataactactatgaaaaattagcgaatattaacatcccaattgcgaatgctggtgatggtagtggacaacatccaacacaaagtttacttgatttaatgacgatatatgaagaatatggatattttgaaggcttgaatgtattgatttgtggagacattaaaaattcacgtgtcgcacgtagtaattaccatagtttaaaagcattaggtgcaaacgtaatgtttaatagcccaaatgcttggattgatgattctttagaagcaccttatgtaaatatagatgatgttatagaaacagtagatatagttatgttattaagaattcaacatgaaagacatgggcttgcagaagaaactagatttgcagcagatgattatcatcaaaagcatggcttaaataaagtgcgctataacaaattacaagaacatgctattgttatgcatccggcacctgtgaatagaggagtagaaatacaaagcgatttagtagaagcttcaaaatcaagaatttttaagcaaatggaaaatggcgtttacttaagaatggcagtcattgatgaattattaaaataggtaaggggacgaaaatgatgaaattaattaaaaacggtaaagtattacaaaatggcgaattacaacaagcagatattttaattgatggtaaggtaattaaacaaattgcacctgcaattgaaccaagcaatggtgttgacatcatagatgcgaaaggtcactttgtgtcacctggatttgtcgatgttcatgttcatttacgtgaacctggtggtgaatataaagagacaattgaaactggtactaaagctgctgctagaggcggatttacaactgtatgtccaatgcctaacacaagaccggtaccagattctgtagaacattttgaagctttacaaaaattaatcgatgacaatgctcaagtacgtgtattaccttatgcttcaattacaacacgtcaattaggtaaagaattggttgatttcccagcactagtaaaagaaggtgcctttgcgtttacagatgacggtgtaggagtacaaactgcaagcatgatgtatgaaggtatgattgaagctgcaaaagtaaacaaagccatcgtagcacactgtgaagataattcattaatctatggtggtgcaatgcatgaagggaaacgcagtaaagagttaggtataccaggtattccaaacatttgtgaatctgttcaaatcgcaagagatgtactattagctgaagcagcaggttgtcattatcatgtatgtcatgtttctactaaagaaagtgttagagtcattcgtgatgctaaacgcgcaggcattcatgttacagctgaagttacaccacatcatttattgttaacagaagatgatattcctggtaataatgccatttataaaatgaatccaccattgagaagtactgaagatagagaggctttgttagaagggttactagacggtacaattgactgtatcgcaacagaccatgcaccacatgcacgtgatgaaaaagcgcaaccaatggaaaaagcaccattcggaattgttggtagtgaaacagcattcccattattatatacgcattttgtaaaaaatggtgattggacattacaacaattagtagattacttaacaattaaaccatgtgagacatttaatttagaatacggcacattaaaagaaaatggttatgcagatttaacaatcattgatttagatagtgaacaagaaattaaaggagaagatttcttatcaaaagcagataatacaccatttatcggctataaagtttatggaaatccgatcttaacaatggttgaaggcgaagttaaatttgagggggataaataatatgcaaagcaaacgttatctagtgttagaagacggttctttttacgaaggctaccgtttaggatctgataacttaactgtaggagaaattgtatttaatacagcgatgacaggttatcaagaaactatttcagatccatcatatacaggtcagatcattacttttacgtatccattaatcggtaattatggtatcaatagagacgattttgaatcattagtacctacattaaacggtattgttgtgaaagaagcgagtgcgcatccaagtaattttagacagcaaaagacacttcatgacgttttagaattgcatcaaattccagggattgcaggtgttgatacaagaagtattacgcgtaaaattcgacaacacggtgtgttaaaagctggttttactgatcgaaaagaagatattgatcaacttgtcaaacatttacaacaagtagaattacctaaaaacgaagtagaaatcgtttcgacaaaaacaccgtatgtttcgacaggtaaggatctaagtgttgtacttgtagactttggtaagaagcaaaatattgttcgagaattaaacgtcagaggttgtaacgtcacagttgtaccatatacaactactgccgaagaaattttagcaatggctccagatggcgttatgctatcaaacggaccaggtaatcctgaagttgtagaatgtgcgattccaatgattcaaggaattttagggaaaattccgttctttggtatctgtctaggacatcaactttttgcattatctcaaggagcaagctcatttaaaatgaagtttggtcatcgtggtgcgaaccatccagttaaaaatttagagactggaaaagttgatattacgagtcaaaaccatggatatgcaatagatatagattcgttaaaaagtactgatttagaagttactcatcttgcattaaatgatggtactgtagaaggtttaaaacataaaacattaccagcattttctgttcaataccatcctgaagcaaatccaggaccgtcagattcaaactatctatttgatgattttgtagcaatgatgactaattttaaggaaaaggagcgtcatatcaatgcctaaacgtaatgatatcaaaacaattttagtaatagggtctgggccaattatcataggtcaagcagctgaatttgattatgctggaacacaagcatgtctagctttaaaagaagagggataccgagttattcttgtaaattcaaatccagcgacaatcatgactgataaggaaattgcggataaagtatatatcgaaccgttaactcatgattttatagcgcgaattatacgtaaagagcaacctgacgctttactcccaactttaggtggtcaaacaggtttaaacatggcgattcaactacacgaaagtggtgtgcttcaagataataacgtccaattattaggaactgagctaacatcaattcaacaagcagaagaccgtgaaatgtttagaacattaatgaatgatttaaacgttcctgtaccagagagtgacattgtaaatacagtagagcaagcctttaaattcaaagagcaagtgggatacccgctaattgttagaccggcatttacgatggggggtaccggaggcggtatttgtcataatgatgaagaattacatgaaatcgtctcaaatggtcttcattatagtccagcaacgcaatgtttattagaaaaatctatcgcaggttttaaagaaatcgaatacgaagtaatgcgtgataaaaacgataatgccatcgttgtatgtaacatggaaaatattgatccagttggtattcatacaggcgattcaattgttgtggctcctagccaaacattatcagatgttgagtatcaaatgttacgtgatgtttcattaaaagttattcgagctttaggtatcgaaggtggttgtaatgttcaattagcattagatccccattcattcgattattatattatagaagtaaatccgcgtgtatcacgttcatcagcgttagcttcaaaagcaacaggatatcctattgcaaaattagctgctaaaatcgcggttggtctaacattagatgaaatgttaaatccaattacaggaacatcttatgcagcgtttgaaccaactttagactatgtgatttcaaaaataccaagatttccttttgataaatttgaaaaaggagaacgagagcttggcacacaaatgaaagcaacaggtgaagttatggccattggtcgaacttacgaagaatcattgttaaaagcaattcgatcacttgagtatggtgtgcatcacttaggattaccaaatggtgaaagcttcgatcttgattatattaaagaacgtatttcacaccaagatgatgaacgattatttttcatcggcgaagcaattagaagaggcacaacattagaagaaattcataatatgactcagattgattacttcttcttacacaagttccaaaacattattgatattgagcatcaattaaaagagcatcaaggtgatttagaatatcttaaatatgcaaaagattatggatttagtgataaaacaatagcgcatcgctttaatatgacggaagaagaagtatatcaattgcgtatggaaaatgatattaaacctgtttacaagatggttgatacttgcgcagctgaatttgaatcttcaacaccatattattatggtacatacgaaactgaaaatgaatccatagttactgacaaagaaaaaatcttagtattaggctctggaccaattcgaatcggccaaggtgtagaatttgactatgcgacagttcacgccgtttgggcaattcaaaaagcagggtaccaagcgataattgtgaataacaatccagaaacagtttcaacagacttctcaatttctgacaaattatactttgaacctttaactgaagaagatgtgatgaatatcattaatttagaaaaacctaaaggtgtcgttgtacaatttggaggacaaacagcgattaatttagcagacaaattggctaaacatggtgttaaaatacttggtacttcactagaaaatctaaatcgtgctgaagatagaaaagaatttgaagcactattaagaaaaattaacgtgccacagccacaagggaaaacagctacatcacctgaggaagcattagcgaatgctgcagaaatcggatatccggttgtagtaagaccttcttatgtattaggtggtcgcgcaatggaaattgtagacaatgacaaagagttagaaaactatatgacccaggctgtaaaagcgagtccggaacatccggtactagtcgatagatatttaactggtaaagaaattgaagttgatgcgatttgtgatggagaaacggtcattattccaggaatcatggaacatattgaacgtgctggtgtacatagtggtgactcaatcgctgtatatccgccacaaactttgacagaagacgagttagcaacacttgaggactatactataaaattagctaaaggtttaaacatcattggcttaatcaacattcaattcgttatagctcacgatggtgtatatgttttagaagtaaacccacgttctagtagaacggtaccattcttaagtaaaattactgatattccaatggcacaattagctatgcgagcaatcattggggaaaaactaacagatatgggttatcaagaaggggttcaaccatatgctgagggtgtctttgtgaaagcaccggtatttagttttaataaattgaaaaatgttgatattactttaggacctgaaatgaagtcaacaggtgaagtgatggggaaagatactacattagaaaaggcgttattcaaagggttaacaggtagtggcgttgaagttaaagatcacggtacagtattaatgaccgtcagtgacaaagataaagaggaagttgttaaattggcacaacgcttaaatgaagttggctataaaattttagcaacgtctggaacagctaataaattagctgagtatgacatacctgcagaagtagtaggcaaaattggtggcgaaaatgatttattaacacgtattcaaaatggtgatgttcaaatcgttataaatacaatgactaaaggtaaagaagtagaaagggatggcttccaaattagacgtactacagttgaaaatggtattccatgtttgacatctttagatacagctaatgccttaacgaatgtaattgaaagtatgacatttacaatgcgtcaaatgtaaatcaatcaaactgtatcggtggggctgtaattaaccatttacttaaagaagtttatattacagcctcattattttaatgaatttcttaatataaagggagacatatatgatgaaagatttaccaattattgcattagattttgaatcaaaagaaaaagtaaatcaatttttagatttatttgatgaatcattattcgtaaaagtaggtatggaacttttttatcaagaaggtcctcaattaattaatgagataaaagaaagaggccatgatgtatttttagatttaaaattgcatgatattcctaatacagtaggtaaggcgatggaaggactagctaaattgaatgttgatctggtaaatgttcatgctgctggtggcgtaaaaatgatgtctgaggccattaaaggattaagaaaacataatcaacatacaaaaattattgcagtaacacagcttacgtcaacaacagaagacatgttacgacacgaacaaaatatacaaacatcgattgaagaggccgttttaaattatgccaagttagcaaatgcagctggtttagatggcgttgtttgttcacctcttgaaagtcgtatgttgactgaaaagttaggtacatcatttttaaaagtaacaccaggtattagacctaaaggtgcatctcaagatgaccaacaccgtattacgacaccggaagaagcaagacagcttggttcgacgcatattgtagtcggtagaccgattacacaaagtgacaatccagtcgaaagttatcataaaattaaagaaagttggttagtataatggctaaagaaattgcaaaatcattattagatattgaagctgtaacattatcaccaaatgatttatatacatggagttcaggtattaaatcaccgatttactgtgataaccgtgttacgttaggttatcctttagttcgaggcgcaatccgcgatggtttaattaacttaattaaagaacactttcctgaagtagaagttatttctggtactgcaacagctggtattccacatgcagcttttattgctgaaaaattaaaattaccaatgaattatgttcgttcatcaaataagagtcatggtaagcaaaatcaaatcgaaggtgctaaaagtgaaggtaaaaaagtagttgtgatagaagatttaatttcgacagggggatcttcagtcacagcagttgaagccttaaaacaagcaggtgcagaagtattaggtgttgtagctatctttacttacggtttgaaaaaagcagatgatacatttagcaatattcaactacctttttacactttaagtgattacaatgaattaattgaagtagctgaaaatgaaggtaaaatttctagtgaagatatccaaacattagttgaatggagagacaacttagcataatatagacactagaaggaggaattcaacaaatgaatgacaaaacatctaatgatttatatgggaagataaaacattgtaacgaatttatcaatcattcaaatgattccaatctatctagtagtcacgatgtcgacgaaagttcaacgaagcaaaaacatataaaaaataaaacaactatagatcataatgatgatttatttaaacatgtaaaggatatattacgtaaacaaggacaaatttaaaaacaaaaaagctatagtgtttaatatcaggggctgcttaaccgcatccgaatattacaaacactatagcttttattatataaaaaatttattagcggataattaactttattaaaatccaaccaattaagaatacgagtaataggactaatactggaatcacataatgtaacataacgtccctcctttaacttaattttaattgtaatcaaatttgacaataagtcaaaacattaatacctatgataagtatcatttattaacatatgtatcatatttttaatcttgcgtaatttttatcgttaactatgtgatttaatcaacaggccaataagacgtttgtcattcgtgcacataacggtatgacgcgcttttgtcattttaattatgttaagataatagtagttatagaagttcgacctataggaggcatagcatggatattccaaaaatcacgacatttttaatgtttaataaccaagctgaagaagctgttaaactatacacaagcttatttgaagatagtgagattataacaatggctaagtatggtgaaaatggacctggtgatcccgggactgtacaacactcaatatttacattaaatggacaagtattcatggcgattgatgctaatagtggcacagaattaccaatgaatcctgcgatttcattatttgttacagtaaaagatactattgaaatggaacggctatttaatggattaaaagatgaaggtgccattttaatgccaaaaacgaatatgccaccatacagagagtttgcttgggttcaagataagtttggagtaagttttcaattagctttacctgagtaaaaggatttgcacagcgttgaatgataaagaaacactttttcttatgcatgcgttttacctatgtatttctattttaagtacacattagcattttagtttcactcatttttaaaatcacaaagataatttgtaacttaaatgatgatacgttatttaaaaacacgatacttcgtttcaatgaacgcattaaattaaaaataaacacctcgcaaaagaaagtagtcctttcttatggtgaggtgtttatttgtcgacaacttgattatgattgtttcattttttgaataagttcataatcaggtgtagcatacaaagttttttgattgtcatatgttacaaacccaggctttgcacctgatggtttgtgcacatttttaattaatgtgtaatcaacaggtatttgtccagaattaccagcttttgaaaagtatcctgctaacatagccgcttccttgattgtcgtatcacttggtgcatcattaaatataacgacatgtgaaccaggaatatcttttgtgtgtaaccatgtgtgagtttttttagcttttttatttgttaaataatcattttgcttgttattcttgccaacatatatatcgtcgccatcagttgatacataatgttgtaattgaatctgcgctttctttttcttagtttgatttttacgctgtttcataaagccttgttctgctaattcatctctaatttcatcaatgtcatggacagaaatatgatgtaattgttgttcgattgttgaaaaataatctatattgtctttcgtcaattgaatttgatgttgtaattcacgttctctcgttttcatacgattatattgtttataataatattgagcatttgctgatggggattttgtaggatttaaaggaatgacaacttcttcattcgtataataattcaatgccgtcacttctttatcgccttgcttaattcgatatatattagcagtgatcaattcaccatataactgttcagtatctttatttttagactgctcatattcttcaatcaacttcgctaatttattttgatatttgtgcaactgctgttgaacaaatcgaactaaatcattcgcacgttgtttaacgcgttcacgttcgccacgcgcatcataaaaacgatcaagtaaatcatttaatgaatcgtatgtaactgtatcatcattaaattgatttaactttataaaatagaaatcctctttacctgtttcatgatttttatgaaaaataggagtaggtggtaacttggtttctgccattacttcgtcaaatgcttctggtaatgttgatgaagtcataaattgacgacgactaacgatttcattcgtaattaaagggctaaatccttcaaactgattcaataattgtttagcaatattacctgcgttaaaatcgatatatttcaacacctctgcacctgtaatatcatacggatttattttgtgctgagtaggtggtgcttcataattaaatcctggcattactgtacgatagtgattcgtatttggtgttaagtgtttaaatccttcaattattttgcgattttcatctactaaaattaagttactatgtttacccataatctcaaggatgacagtgcggtaaatagtatcgccaatttcatctttactctttatttcgatttcaatgcgacgatcattaccaatttgcttaatcgattcgataataccaccttctaagtgttttctaaaaacacgcgcaaacatgggtggattaaatggattatcatattttttagtagttaattgtaatcttgaaaagtttggatggattgacaataacaattgatggttttgtctattttgacgtacaaccattagtatcgtgtcattatcaggttgattgattttgtgaacgcgtcctgttgttaaaaattgtagagactcaaccattttctttgtaaataagccatcataagccataatttatcttccaccttcttcatatcattcgtttcattttaacatgattgtaacttttcggtatagttattgaaccatacattatgccatacattttacattatctaaaagtttgcaattcaatttatttaattaaaattaatcgtgcaatataacgatattgttagacttaatagaaattatggcatgcaatttcaaatatgctatacaatataaagaacaatgtgatatcatatttaaataatagaagattagcttagagaggtcgtaaggcatggataatgaaaaaggattgttaatcgttttatcaggaccatctggagtaggtaaaggtactgttagaaaacgaatatttgaagatccaagtacatcatataagtattctatttcaatgacaacacgtcaaatgcgtgaaggtgaagttgatggcgtagattacttttttaaaactagggatgcgtttgaagctttaatcaaagatgaccaatttatagaatatgctgaatatgtaggcaactattatggtacaccagttcaatatgttaaagatacaatggacgaaggtcatgatgtatttttagaaattgaagtagaaggtgcaaagcaagttagaaagaaatttccagatgcgctatttattttcttagcacctccaagtttagaacacttgagagagcgattagtaggtagaggaacagaatccaatgagaaaatacaaagtcgtattaacgaagcgcgtaaagaagttgaaatgatgaatttatacgattacgttgtagttaatgatgaagtagaacttgcgaagaatagaattcaatgtattgtagaagctgagcacttaaaaagagagcgcgtagaagctaagtatagaaaaatgattttggaggctaaaaaataatgttaaatccaccattaaaccaattaacgtcacaaattaaatcaaagtatttaattgcaacaactgcagcgaaaagagcgcgtgaaattgatgaacaacctgaaactgaattattaagtgaatatcattcatttaaaccagttggtagagcgttagaagaaattgctgacggtaaaattcgccctgttatttcaagtgattattatggtaaagaatagtttcgaccattaaaaatatgtgaagctagacgtacatcaaatacgtcaagggatatccaaatcaaacgcacctatgtaggtgtgtttttttagtttatccaatgattgatgttataataatactaaatttgtatctataaaaaagtaatgagcatttgtgcgcatatgatgatgtaaagcgtaaatgtcatagtgatatttaagggagattgaatatgaagaaaatattattagccgttacaggtggcattgcggcatataaagcgattgatttgacaagtaagttaacacaatctgggtatgaagttcgcgttatgttaacgaatcacgcacaaaaatttgtgacaccattagcatttcaagcaataagtcgaaatgctgtttatacagatacttttatagaagaaaatccttcagaaatacagcatattgcattaggtgattgggcagatgcaatcattgttgcacctgcaacggcaaatacaattgcaaaattgagtgtaggtattgctgatgatttggtgacatcaacgttgctagcaacagagacaccgaaatttattgcgcctgctatgaatgtgcatatgtatgaaaataaacgtacgcagcaaaatattaatattttaaaagaagatgggtatcattttatcgaaccaggaagcggatttctagcatgtggttatgttgctaaaggacgtatggaagaaccgcttcaaatcgtttctgttattgatgctcattttcaaaatagtaatcgtttagctaatagttcatttcaagataaacgcgcattggttacagcaggaccaactattgaagttatcgatccagtcagatttgtatccaatcgttcttctggaaaaatgggttatgcaatagctgaagcattgcgaaatcgaggagctatcgtgacgttagttgctggtcctacaacactagaggatccaaaagatattgaagttattcatgttcaaagtgctgaagaaatgtttgaacaagtgacaagccgatttgacgaacaagatattgttgtaaaagcagcagccgtatctgactatacaccggttgatgtattagaacataagatgaaaaagcaggatggtgatttatcagtatcttttaaacgtactaaagacattcttaaatatttaggtgaacataaaacatcacagtatttaataggctttgcagcagagactgaagatattgaaaattatgcacaacaaaaattacgcaagaaaaatgcagatgtgattatttcaaataatgttggggatatgtctatcggatttagttctgatgataatgaattgacaatgcattttaaaaataatgaaaaggtaaatatcaagaaaggaaaaaaagtagtattagctgcacaaattttagatgaactagaaactaggtggcaataatgatagcgaaagtcatagtcgatgtcgcgtcgaagagcgttgactataaatttgattatataattcctgaacaactcgaatctgtcatccaacctggtgtgcgtgtgattgtaccttttggaccaagaacgattcaaggttatgtaatggaagtaacagcagaacctgatgcacaacttgacgtttcgaagttaaaaaaaatcatagaagtgaaagatatacaacctgaattaacatcagaattaatagctttaagtgagtggatgggttcaactcatgtcattaaacgtatttctatgctagaagtgatgcttccgagtgctattaaagcgaagtataaaaaagcatttaagatgaaagatgacaaagaggtaccttcagctttattacaaaaatttgataagcatggttactattattataaagatgcgcaaaaaaataatgatattcaattgcttatgaagttgttaaaagatgatatcgttgaagaaaaaacgattctcacacaaaatataactaaaaaaaccaagcgtgctgttcgtgtcattgaagggtatcatcctgatgaagtattagctaagttggagaaagttattaaacaatacgatttgtatgcttacttgtctgaagaacaacataaaacaatatttttaactgatattgaggatatgggcttttcaaaatccagtttagatggacttatcaaaaaaggttatgttgaaaaatatgacgcggttgttgaaagagacccatttaaagatcgtgttttcgaacaagaatcaaaacagcaattaacagaagaccaatataaagcatatgaagcgattaaagctaaaattgtaagccaagagcaagaaacatttttacttcatggtgtgacgggatcaggtaaaacagaagtatatttacaaacgatagaagatgttttaagccaaggaaaacaggcgatgatgttagttcctgaaatcgctctaacaccgcaaatggttttacgcttcaaacgtcgatttggtgatgacgttgctgtattacattctggcttatctaatggggaacgttatgatgagtggcaaaaaattagggatggtcgtgcgagagtaagtgttggtgcaaggtcaagtgtgttcgcacctttcaaaaatttagggttaatcatcattgatgaagaacatgaatctacatataagcaagaagattatccgagatatcatgctagagaaattgcccaatggcgaagtgaatatcatcactgcccagtcattttaggaagtgcaacaccatgtcttgaaagttatgcacgagctgaaaaaggcgtttatcatttgctatcattaccaaacagagtgaaccaacaagctttacctgaaattgatatagtagatatgcgtgaagaattgagtgaaggtaatcggtcaatgttttcaaaagatttacgtgaagccatacaattaagattagatcgacaggaacaagttgttttatttttaaatcgacgtggttatgcatcgtttatgttatgtcgggattgtggatatgtaccgcaatgtccaaactgtgatatttcattaacgtatcataaaacgacagacttattaaaatgtcactattgtggttaccaagagacgccaccgaatcaatgtccaaattgtgagagtgaacacattcgacaagtaggtactggtactcagaaagttgaagaactattgcaacaagaatttgaagatgcgcgcataattaggatggatgtagatacaacctcaaagaaaggtgcacatgaaaagttattgactgaattcgaaaaaggtaacggtgatattttactaggtactcagatgattgcgaaaggattagattatccaaatattactttagttggtgtgctgaatgcagatacaatgttaaatttacctgattttcgggcgagcgaacgtacttatcaactattaacgcaagtggctggtagagctggtcgtcatgaaaaggcaggtcaagtcatcattcaaacgtataatccggatcattattcaatattggatgttcaaaaaaatgattatttaacattttatcgtcaggaaatggaatatcgtaaattaggaaagtatccaccgtattattatttgattaatttcacaatctcacataaagaaatgaagaaggttatggaagcatcgcagcatgttcataaaattttattacagcatttaacagaaaaagcgcttgtactaggtccatctccggcagcacttgcgagaatcaacaatgaatttagattccaaattttagtgaaatataaaagtgaacctggattattacaagccattcagtttttagatgactattaccatgaaaaatttataaaagaaaaattagcattgaagattgatattgatccacagatgatgatgtaacattactaattattagaaacaagttcagtatgtacgagtatttgaaccagtgtttgaatatttactttaagtacagaaaaagggcagaatatacaactgttaactatttaaattagcagtttatattctgtctttttatatggctttataacttacgtgattttggtttgataaggaatttattagtattttcatttacgaattctgattttaatgcaagcgccatacttactgatgaataaaagtactaatgattaaacaaactatttttaaatggcaaattgaaatagtgcaaattttacacttataaattaatggctataaactattttatatctatctatgttttaactacttaaattattagacaaaacaattttcttaaattatcaattaaagtatttaaaaatattgatggttaatgtaaaatatcaatataaataagttttttaaatttatgtatgtttatttgattcaaacaaaataacttaagaggagaaagtttatgaaaaagacactgggatgtttacttttaattatgcttttagtcgtagcaggttgttcttttggtgggaatcataaattatcatcaaagaaatcagaagaatcaaaacaagaaactgtaaaaaaagaatcggaagaagagaaagatccagatttagagaaatatgaagaaatagagaagaaaatgaaaggaattaaagatgcgccatctcttgataagttggatccattaatgacagaaaagtcgtttacgaatagtaaagggattcaaggatggaaagattacaaagaattaatgggtaaagtggaacttgcagattatagatttactaaagattcaaaaggatcttcaataaaagatgttgatgcattctttaaaggtaagaaaggtataaaaaggaaagtgattgaaacacacgatgatgtaaaacaagttgattattggtatgtagatccagatggaaagaaaattggcaattcaaacacacctgttttttacgcagaaattatgacaaaatataaagatggaaagttagtttatgcatcagtcgaaccaggatcttacgtaatacataaagatgatgcaattaaatatgacgattattctaagttaaaaaaattaagtcagctaactaaacttgatcatccaaaaccagttccatatagcgtagctcaaatcaaatctttcggagtacctttaacaagcgtttcatttatgacacatggatcaaaggatactaaagatgaagtgttgccggcattggcctatttcactttttcaccaaaaaattatgaagacaagtctaatccagatccaaaagttttaaatttagtacatatggatttcttaaatgcatctagtgattttggtaacgcacattttgttgttttaagtaaatatattaaagagtatgaatcaaactatgaaacagcgtcagatgattctttaaaatagtatttactgtgtgaaaaataaatagtgtactacattaaataatcgcaataataatcccgataaacaatcagcattactgcttatcatatagagttcgtaataactataactctatgattcgcaaataataaatgattgtcatcgggatttatttttatcaatttataaagtgacattaccttgttcatcagcaggtttgaaaacagtaatcactgcactaataattgctaaaatgtgtgggatacctgtccaacagaatattaagtgtagaataccttgcatattcttgccggcataaaatttatgaataccaaaactacctaagaacaatgctaataaaatataaataactttgtttacttgcatttctttccctccagttgaattgcttataatgacattagcttctctttttattatacccacttttagttcaaacattctagtttaagcattcccaatcatctaaatttcagttattcaatccttacaataaatttaggattacacttcagttgcattgtattattttacgtgtgaaatatacgtaatgaatcacatgacaatctttaaattgaaaaatatacattctatgatgtaaggtcgcatttttaatatatttacgttataatggtttgatgaattttattgaggagtaagagctatggcgattaaaaagttagtaccagcatcgcatcctattttaacgaaaaaagcgcaagcagttataaaatttgatgattcgttaaaaagattattacaagatttagaagatacaatgtatgcacaagaagcagctggcttatgtgcacctcaaattaatcagtcattgcaagtggcaatcattgatatggaaatggaaggattattacaacttgttaatccgaaaattattagtcaatcaaatgaaacgataacagacttagaaggttcaattacattgccagatgtttacggcgaagtgacaagaagtaaaatgatagttgtcgaaagttatgacgtcaatgggaacaaagttgaactaactgcacatgaagatgtagcaagaatgattttgcatattatagatcaaatgaacggtatcccttttacagaacgtgcggaccgtattttaacagataaagaagtggaggcatattttataaatgactaaaataatatttatgggtacaccagacttttcaacaactgttttagaaatgcttattgcagaacatgatgtcattgcagtcgtaacgcaaccagatcgacctgttggacgtaaacgtgttatgacaccaccaccagttaaaaaagttgcaatgaaatatgatttacctgtatatcagcctgaaaaattaagtggatcagaagaattagaacaattgcttcaattagatgtagatttaattgtaactgctgcttttggacaattattacctgaatcattgttggcattaccaaaacttggggcaattaatgtacatgcatcattgttaccgaagtatagaggtggtgcaccaattcatcaggcaattatcgatggtgaacaagaaaccggcataacaattatgtatatggttaaaaaattagatgcaggtaatattatttcgcaacaagcaattaaaatagaagaaaatgataatgtcggtacgatgcatgataaattaagtgtattaggggcagatttattaaaagaaactttaccatctattatagagggcacaaatgaaagcgtacctcaagatgatacgcaagcaacatttgcttccaatattcgacgcgaagatgagcgaattagctggaataaaccaggaagacaagtgtttaatcaaattcgtggattatccccatggccagttgcttatacaactatggatgacactaacttgaaaatatacgatgctgaactcgttgagactaataagataaacgagcctggaaccattatagaaacgactaaaaaagccattattgttgctacaaatgataatgaagctgttgcaattaaagatatgcaattagctgggaaaaagagaatgttagctgccaattatttaagtggtgcgcaaaacacactagtagggaagaaacttatatgatagaaaacgtgagaagtcttgcttttgacacgattcaagatatattaaatgaaggtgcgtatagtaacttgcgtatcaatgaagtgttgtcagaaaatgaattaaatgcaatggataaggctttatttacagaaattgtctacggaaccgttaaaagaaaatatacgttagatttttatttaaagccttttgtgaaaacaaaaattaaggcatgggttaggcaattattatggatgagtatttatcaatatgtttatttagataaagttccaaatcacgccatcattaatgaagcagttgaaatagcaaaagaacgtggtggttatcataatggtaatgtcgtaaatggtattttacgtacaatgatgcgtagtgacttacctgattttaatgaaattgcagatcctaaaaaaagaatggcaatcgagtatagtatgccgaagtggattatagatcattgggcaacacattatggtctcgaaaaaactgaaacaattttacagtcatttttagaaacgacatcaacaactgtgcgtgccaacctgacgcgagcatcattagatgatattattgaaaagttgcaagacgaaggttatgacgttgaaaaagatcatgacttaccttattgtctccatataggaggacaaccaattattcattctcgttcatttaaagatggattcgtttcaattcaagataaaagctcaatgtttgttgcacacattatgaatgtagaccgacatgatcacgtattagatgcatgtagtgcacctggcggtaaagcttgtcacattgctgaagttttaatgccagaagggcaagttgacgcttcagatatacatgatcacaaaatagacttaattaattttaatataaaaaaattacgattaacaaatattaaagcctttcaacatgatgcgacaaaaccttatgataaaacatacgataagatacttgttgatgcaccatgtagcggattaggtgtaatgagacataagccggagattaagtatactcaaagcaaacaacatattgagtcactagttgatttacagcttgaaatattggaaaatgtaaaaaacaatgtaaaaataggtggcgaaatcatctattccacatgtacaatagagcaactagaaaatgaaaacgtgatttatacgtttttgaaaaataataaaaacttcgaatttgaaccgtttcaacatccgataactggagagttggtcaaaacgttacaaatcatgccgcaagactttaattcagatggattctttatcactaagataaaaagaaaggacaattaggaatgataactgctgaaaagaaaaagaagaataaatttcttccaaattttgacaagcaatcaatatattcattgcgatttgacgaaatgcaaaactggctcgttgaacaagggcaacaaaaatttcgagcgaaacagatttttgaatggttatatcaaaaaagagtagattcgattgatgaaatgacgaacttatcgaaagacttacgacagcttttaaaagataactttactgttacaactttaacaactgtagtaaaacaagaaagtaaagacggtacaattaaattcttatttgaattacaagatggctatacaattgaaactgttttaatgagacatgattatggaaattcagtatgtgtaacgacacaagtaggttgtcgtatcggatgtacgttttgtgcttctacacttggcggcttaaaaagaaaccttgaagctggcgaaattgtttcacaagttttaacagttcaaaaagcccttgatgctacagaagagcgcgtatctcaaattgtcataatgggtatcggtgaaccatttgaaaattatgatgaaatgatggactttttaagaatcgtcaatgatgataatagtttaaatattggtgcacgtcacattacagtatcaacatcaggtatcattcctagaatatatgactttgcggatgaagatattcaaattaattttgctgtaagcttacacgccgcaaaagatgaagtgcgatcacgcttgatgccaattaaccgtgcatataatgttgagaagttaatcgaagcaattcaatattatcaagaaaaaacaaatcgtcgtgttacttttgaatatggtctgtttggtggtgtgaatgaccaactagaacatgcaagagaattagcacatttaataaaaggcttaaactgccatgttaacttaattcctgtcaaccatgttccagaaagaaattatgtgaaaacggctaaaaatgatatctttaaatttgaaaaagaattaaagagactaggaattaatgccacaatacgtcgtgaacaaggttcggatattgacgcagcttgtggtcaattaagagcaaaggaacgacaagtagaaacgaggtaaagacaaatgctagaggcacaattttttactgatactggacaacatagagataagaatgaagatgcgggtggtattttttataatcaaactaatcaacaacttttagttctgtgtgatggtatgggtggccataaagcaggagaagttgcaagtaaatttgttacagatgagttgaaatcccgttttgaagcggaaaatcttatagaacaacatcaagctgaaaattggttgcgtaataatataaaagatataaattttcagttatatcactatgcacaagaaaatgcagaatataaaggtatgggtacaacatgtgtttgtgcacttgtttttgaaaaatcagttgtgatagcaaatgtcggtgattctagagcctatgttattaatagtcgacaaattgatcaaattactagtgatcactcatttgttaatcatcttgttttaacgggtcaaattacgccggaagaagcatttacacatccacaacgtaatattattacgaaggtgatgggcacagataaacgtgtgagtccagatttgtttattaagcgattaaatttttatgattatttattattaaattcagatggattaactgattatgttaaagacaatgaaattaagcgtttgatagtaaaagaaggtacaatagaagatcatggtgatcaattaatgcaattggcattagataaccattcgaaagataacgttactttcatactcgcggctattgaaggtgataaagtatgataggtaaaataataaatgaacgatataaaattgtagataagcttggcggcggtggcatgagtaccgtttatcttgctgaagatacgatacttaacattaaagttgcaattaaggcgatttttataccacctagagaaaaagaagaaacattaaaacgttttgaacgagaagtacataactcatcacagctatcacatcaaaatatagtaagtatgatcgatgttgatgaagaagatgactgttactacttagtaatggaatatattgaaggtccgactttgtctgagtatattgaaagtcatgggccattaagtgttgacacggcgattaattttacgaatcaaatattggatggtattaaacatgcgcatgatatgcgtattgtacatagagatattaagccacaaaatatattaattgacagcaataaaacgttgaaaatatttgattttggaattgctaaagctttaagtgagacgtctttaactcagactaatcatgtgttaggtactgtgcagtacttttcgccagaacaagcaaaaggtgaggcaacggatgaatgtacagatatttattctataggtattgtgttatatgaaatgcttgttggtgaaccaccctttaatggagaaactgcagttagcattgcgattaaacatattcaggattctgtgccaaatgtgacaacagatgtacgtaaggatattccgcaatctttaagtaatgtcattttacgcgctacagaaaaagacaaagcgaatcgttacaaaacaattcaagaaatgaaagatgatttgagtagtgttttacatgaaaatcgagcgaatgaagatgtctatgaactcgataaaatgaaaacgatagcggtacctttgaaaaaagaagatctagcaaagcatattagtgaacataagtcgaatcaacctaaacgtgaaacgacgcaagtacctattgtaaatgggcctgctcatcatcagcaattccaaaagccagaaggtacggtttacgaaccaaaacctaaaaagaaatcaacacgaaagattgtgctcttatcactaatcttttcgttgttaatgattgcacttgtttcttttgtggcaatggcaatatttggtaataaatacgaagagacacctgatgtaatcgggaaatctgtaaaagaagcagagcaaatattcaataaaaacaacctgaaattgggtaaaatttctagaagttatagtgataaatatcctgaaaatgaaattattaagacaactcctaatacaggtgaacgtgttgaacgtggtgacagtgttgatgttgttatatcaaaaggccctgaaaaggttaaaatgccaaatgtcattggtttacctaaggaggaagccttgcagaaattaaaatcgttaggtcttaaagatgttacgattgaaaaagtatataataatcaagcgccaaaaggatacattgcaaatcaaagtgtaaccgcaaatactgaaatcgctattcatgattctaatattaaactatatgaatctttaggcattaagcaagtttatgtagaagactttgagcataaatcctttagcaaagctaaaaaagccttagaagaaaaagggtttaaagttgaaagtaaggaagagtatagtgacgatattgatgagggtgatgtgatttctcaatctcctaaaggaaaatcagtagatgaggggtcaacgatttcatttgttgtttctaaaggtaaaaaaagtgactcatcagatgtcaaaacgacaactgaatcggtagatgtaccatacactggtaaaaatgataagtcacaaaaagttaaagtttatattaaagataaagataatgacggttcaactgaaaaaggtagtttcgacattactagtgatcaacgtatagacattcctttaagaattgaaaaaggaaaaacagcaagttatattgttaaagttgacggtaaaactgtagctgaaaaagaagtcagctatgatgatgtataaatataattgaagtaaatgtaccgaggtttctatttggaagtctcggtatttttatgttgagattgcggtagttttaaaatgcttcatgtcatcatatacaggtgagcattgtctatcaattctgtatcactctcacaatatttatatcatttgaaatgatcatttatatattaattttccagtctttgatataataaatgcagtaaaattaatcgagaggtgccattttgaagacaggtcgaatagtgaaatcaattagtggggtatatcaagtagacgttaatggcgaacgtttcaatacaaaaccacgaggattatttagaaagaaaaaattttcaccggtagttggtgatatagtggaatttgaagtacaaaacattaacgaaggctatattcatcaagtgtttgagcggaaaaatgagttgaaaagaccacctgtaagtaatatagatacactagtaattgtaatgagtgctgtcgagccaaatttttcaacgcaattattagatcgatttttagttattgcacattcgtatcagttaaatgcgagagttttggtgactaaaaaagataaaacaccaattgaaaagcagttcgaaattaatgagttgttgaaaatatatgaaaatattggctatgagactgaatttattggaaatgatgatgatcgaaaaaaaattgtagaagcttggccagctggacttatagtacttagtggtcaatcaggtgtcggtaagtccactttcttaaatcattatcgtccagaacttaatcttgagacaaatgatatatcaaaatcattaaatcgaggaaagcatactacaagacatgtcgaactattcgaacgtcaaaacggttatattgcagacacacctggattcagtgctttagattttgatcatatagataaagatgaaataaaagattattttcttgaattaaatcgatatggtgaaacatgtaagtttaggaattgtaatcatatcaaagaacctaattgtaatgttaagcatcaattagagatagggaatattgcgcaatttagatacgaccattatttacaactatttaatgaaatttcaaatagaaaggttagatattaaatgacaaaactatatccatcattattatctgttgattttttggatttacaacatgaattaaaacgacttgaagaagcaggtgtcgacggagttcattttgatgttatggatggtcaatttgtgcctaatatatctattggtttaccaatattagatgcagtaagaaaaggcacaacattacctatagacgtacatttgatgattgaaaatccagaaaagtatattgcatcatttgcagaacatggtgccgatatgatttcaattcatgtcgaatcaacgcctcatattcatcgtgctattcaaatgattaaacatttagataaaaaagctggtgtagtaattaatcctggtacaccaatatcacaaattgaacctattttagacattgttgattatgtactagtgatgacagttaacccagggtttggtggtcaatcatttattgatcaatgcgtagaaaaaatagcgggtcttaatgctattaaaatggaacgtcaattaaactttgatattgaagttgatggaggcgtaaataccgatacagcgaaagtttgtgttgaaaatggtgctacaatgctagtaacaggttcatttttctttaaacaagaggattataaaaaagtcacacaagcattgaaaggttgagtgtatatgcatataaatttattatgttctgatcgacacttgccgcaagatatttgggccaaaagtaatgaaggtaaatggggcggcgttgatagaggtgctttgattttattgaagcatcaaattatcccttttttctcagtgggagactttgattcagtcagtaaagaagaacgccaacttctaacagaacagttacaaatcaaaccagttcaagctgaaaaagctgatacggatttagctttagcggttgataaagctgttgcacttggatttgatagtattacaatttatggtgcaacaggcggacgattagatcacttttttggggcaattcagttattattgaaaaaagcatattataaacatgatgttcatatagaagttatcgatcaacaaaataaaattgaattattgcctaaaggtcaacatacagttgaaaaagataagagttatccgtacatttcatttataccgatgactgatgatgtagaactttctctagcaggttttaaatataatttagctagacaaatgcttaatataggttctactttaactatttcaaatgaaattgagtctttgcaagcgaaagtaactgtacatgatgggttgattttgcaaattagaagtacagatttaaattaagtatattcaaatttgtgaggatttttaataaagtgcatgagttatttaacaaagtgacgtttatagatagaatttataacataataatagatgaatcacgctgtaattaatgaagattatggcgtgatttattattgaaaggaaaattgtaggtcctagtacattgatttatgtgccaaaatcgatattgaacccataagtccaatttgacagagaaccattattaaacgtattaaccaaattatattgatagttcgaatttcactatgaaccattatgtattgtttggtaacaaaaaaagaactaagaggttgagctcttagttcttaagtaaatgtgtcctccacataaggtcacattttttatgtgcaatatatttattaaactctagttactttaccagattttaaagcacgtgcagaaacccaaacttttttaggtttaccgtcaactaggattctaactttttgaaggttagcgttccatctacgtttagtagagtttaaagcgtgtgaacgtctgttaccagtcgaagctttacgacctgttacgaaacattgtttacccatatgagtacctcctttaataaatataaatacacataactacttatatacttaattaagatagcatagtttcatttgaaaaacaatgaataattttcacataaaagtcaaaaatactgagttttgtgatataattgtagactgtgaagttatgtagtatgatattttagagaaataagtgaatgaaacatttaaaatttttatttaatgatactacatctattaaaagaaaacgcctatagataatcgtcatgagtgtaaattcagtttactcaaaatataataggtgatttaagcgtaagtcattctgataagttgtaccattgatattttataaaaataatcaatgaaacttaaagcgtttatgactacactaagtggtaaaattttaaaagtgattagggaaaacgaataataaactttgaaatttaggagggacaaagatatgacattagagatttcaaatgattacggtaaaattgatatttcaaacgaagtgattgcttcggttgtaggtggaaaggccgttgaatgttatggtattgtaggtatggcatctagacaacaagttagagatggtattgcggaaatactaggacatgaaaattatgctaaaggcattaaagtaactgaaaataatggcgtagtggatatagatatgtacattattgtaagttacggtgtgaaaatatctgaagttgccaataatgtacaatcaacagtgaaatatactttggaaaaatcacttaatgtatcagtaaattcaatcaatatatatgtacaaggtgtacgtgtgaataatacaggcaagaaagcttaggaggacaacttgaaatgattagcaaaattaatggtaaattatttgccgatatgattatacaaggggcacaaaatttatctaacaatgcagatttggtagattctttgaatgtgtatccagtgccagatggtgatacaggaacaaatatgaatcttactatgacttcaggtcgcgaagaagtagagaataatttgtcgaaaaatatcggcgaattaggtaaaacattctcgaaaggtttactaatgggtgcaagaggtaactctggtgtcatcttgtcacaattattcagaggattttgtaaaaatattgaaagtgaatctgaaattaattcaaaattgttagctgaaagttttcaagctggtgttgaaacggcatataaagctgttatgaaaccagttgaaggtacaatacttacagttgcaaaagatgctgcgcaagctgcaatagaaaaagcaaataatactgaagattgtatagaattaatggagtacattattgtaaaagccaatgaatcacttgaaaacacaccaaacttattagctgtacttaaagaagttggtgttgttgatagtggcggtaaaggtttgttatgcgtttacgaaggattcttaaaagcgcttaaaggtgaaaaagttgaagctaaagttgcaaagatagataaagatgaatttgtacatgatgaacatgatttccatggtgtaattaatactgaagatattatttatggctattgtactgaaatgatggttcgttttggaaagaataaaaaagcctttgatgaacaagaattcaggcaagatatgagtcaatttggtgattctttattagtcattaatgatgaagaaattgtgaaagttcacgtgcataccgaatacccaggtaaagtgtttaattatggtcaacaatatggtgaattaattaaacttaaggttgaaaatatgagagaacagcatcgtgaagtgattcgaaaagaacagcacacagctaaaccgaaaatggaaacggttgaaacagcgattattactatttctatgggtgaaggtatttcagagatatttaaatcaatgggtgccacacatatcattagtggtggacaaacgatgaatccttctacagaagatatcgttaaagtcattgaacaatcaaaatgtaaacgtgcaattattttaccgaataataaaaatattttaatggcaagtgaacaagcagcgagtattgttgatgcagaagctgttgttattccaacgaaatctattcctcaaggtataagcgcactattccaatatgatgtggacgcaacacttgaagaaaataaagcgcaaatggctgattcagtaaataacgttaaatctggttcattaacgtacgctgttcgtgatacgaaaattgatggcgttgagattaaaaaagacgcgtttatgggcttgattgaagataagattgtaagcagccaaagtgatcaattaacaacggttactgagttgttaaatgagatgttagcagaagatagtgaaatattgactgtgattattggtcaagatgcagagcaagcagttacagataacatgataaactggattgaagagcaatatccagatgtagaagtggaagttcatgaaggtggacaaccaatttatcaatatttcttttcagtagaataaaaatttaaaataaaaaactaccaatgataaatcatcagttggtagttttttattttgctattttagtgagatagcgggttaaaagtatcattctcgagttgctaacaatgtcatgttcaacttagtcatgataaaataaataacatactaaatgatacgtaaaatcaaataaaacataggtgatttattttggctaaagtaaacttaatagaaagtccatattctcttttacaattaaaaggtataggtcctaagaaaatagaagtattgcaacaactaaatattcatacagtggaagatcttgttctttatttgccaactagatatgaagataatacagtgattgatttgaatcaagcagaagatcaatctaacgttacgatagaaggacaagtatatacagctccagtagttgcattttttggaagaaataaatcaaaattaaccgttcatttaatggtaaataatattgctgtcaaatgtatttttttcaatcaaccgtatttaaaaaagaaaatcgaattaaatcaaactataactgttaaaggtaagtggaatagggttaaacaggaaattactggtaatagggttttctttaattcacaagggacacaaactcaagaaaacgcagatgttcaattagaaccagtctatcgtattaaggaaggtattaaacaaaagcaaatacgagaccaaattagacaagcgttaaatgatgtgacaattcatgaatggttaactgatgaactaagagaaaaatataaattagagaccttggactttactttgaacacattacatcatcctaaaagtaaagaggatttattacgtgctcgtagaacctatgcatttactgaactgtttttattcgaattacgtatgcaatggctaaatagattagaaaagtcatctgacgaagcaattgaaattgattatgacatagaccaagttaaatcatttattgatcgtttaccttttgaactaactgaagcacagaaatccagtgttaatgaaatttttagagatttaaaagcaccaatacgtatgcatcgattacttcaaggtgatgtaggttcaggaaaaacagtagttgctgcaatttgtatgtatgcattaaaaacggctggttatcaatcagcattgatggtaccaactgaaattttagcagagcaacatgctgaaagtttaatggctttatttggagattctatgaacgttgcattgttaactgggtcagtaaaaggtaagaaacgaaagatacttttagaacaacttgaaaatggtacgattgattgtttaattggaacccatgctttgattcaagatgatgtgattttccataatgttggtttagtaattacagatgaacaacatcgatttggtgtgaatcaacgccagcttttaagagaaaaaggtgcaatgacgaatgtgttatttatgacagcaacgccgataccaagaacactagcaatatcagtttttggtgagatggatgtgtcttcaattaaacaattaccaaaaggtcgtaaacctatcattactacttgggcaaagcatgagcaatacgataaagttttgatgcaaatgacctcagagttgaaaaaaggtcgtcaagcatatgtcatttgcccgcttatagaaagttctgagcatctcgaagatgttcaaaatgttgtcgcattgtacgagtctttacaacagtattatggtgtttcccgtgtagggttattgcatggtaagttgtctgccgatgaaaaagatgaggtcatgcaaaagtttagcaatcatgagatagatgttttagtttctactactgttgttgaagtaggtgttaatgtaccgaatgcaacttttatgatgatttatgatgcggatcgctttggattatcaactttacatcagttacgcggacgtgtgggtagaagtgaccagcaaagttactgtgttttaattgcatcccctaaaacagaaacaggaattgaaagaatgacaattatgacacaaacaacggatggatttgaattgagtgaacgagacttagaaatgcgtggtcctggcgatttctttggtgttaaacaaagtggattgccagatttcttagttgccaatttagttgaagattatcgtatgttagaagttgctcgtgatgaagcagctgaacttattcaatctggcgtattctttgaaaatacgtatcaacatttacgtcattttgttgaagaaaatttattacatcgtagttttgactaattgccatgctgatttgtcaatttgagtgcaacacttcgttaattgagtgatatgacacttgaactatttaaatgtaaagtggtattttaacaatttataaattttcgactaaataatagctaaataatacagttatttgttgagtcggttaaatagaaagtgttatgatatgtgaggaatgtttaagactaggtactaaaaaatgaggggtgagacgttgaaactaaagaaagataaacgtagagaagcaatcagacaacaaattgatagcaatcccttcatcacagaccatgaactaagcgacttatttcaagtgagtatacaaacaattcgtttagatcgcacttatttaaacataccagaattaaggaagcgtattaaattagttgctgaaaagaattatgaccaaataagttctattgaagaacaagaatttattggtgatttgattcaagtcaatccaaatgttaaagcgcaatcaattttagatattacatcggattctgtttttcataaaactggaattgcgcgtggtcatgtgctgtttgctcaggcaaattcgttatgtgttgcgctaattaagcaaccaacagttttaactcatgagagtagcattcaatttattgaaaaagtaaaattaaatgatacggtaagagcagaagcacgagttgtaaatcaaactgcaaaacattattacgtcgaagtaaagtcatatgttaaacatacattagttttcaaaggaaattttaaaatgttttatgataagcgaggataaaattatggttaaattagcaattgatatgatgggtggcgacaatgcgcctgatatcgtattagaagccgtacaaaaggctgttgaagactttaaagatctagaaattatacttttcggtgacgaaaaaaagtataatctgaaccatgaacgaatcgaatttagacattgttctgaaaagattgaaatggaagatgagcctgttagagcgattaaacgtaaaaaagatagctcaatggtaaaaatggctgaagctgtgaaatctggtgaagcagatggatgtgtgtcagcaggtaatactggtgctttaatgtcagctggtttattcattgttggacgtattaaaggtgtagctagaccggctttagtagtaacattgccaacgattgatggaaaaggttttgtctttttagacgttggtgcaaatgctgatgctaaacctgaacacttattacagtatgcgcaactaggggatatttatgctcaaaaaattagaggtattgataatccgaaaatctcattattaaatataggaaccgagccagctaaaggtaatagtttaacgaaaaaatcatatgagttattaaatcatgatcattcattgaattttgttgggaatattgaagcgaagacattaatggatggcgatacagatgttgtagttaccgatggctatactgggaacatggtccttaaaaatttagaaggtactgcaaaatcaatcggtaaaatgttaaaagatacgattatgagtagtactaaaaataaattagcaggtgcaatattgaagaaagatttagctgaattcgctaaaaagatggattactcagaatacggtggttccgtattattaggattggaaggtactgtagttaaagcacacggtagttcaaatgctaaagctttttattctgcaattagacaagcgaaaatcgcaggagaacaaaatattgtacaaacaatgaaagagactgtaggtgaatcaaatgagtaaaacagcaattatttttccgggacaaggtgcccaaaaagttggtatggcacaagatttgtttaataacaatgatcaagcaactgaaattttaacttcagcagcaaagacgttagactttgatattttagagacaatgtttactgatgaagaaggtaaattgggtgaaactgaaaacacgcaaccagctttattgacgcatagttcggcattattagcagcgctaaaaaatttgaatcctgattttactatggggcatagtttaggtgaatattcaagtttagttgcagctgacgtattatcatttgaagatgcagttaaaattgttagaaaacgtggtcaattaatggcgcaagcatttcctactggtgtaggaagcatggctgcagtattgggcttagattttgataaagtcgatgaaatttgtaagtcattatcatctgatgacaaaataattgaaccagcaaacattaattgcccaggtcaaattgttgtttcaggtcacaaagctttaattgatgagctagtagaaaaaggtaaatcattaggtgcaaaacgtgtcatgcctttagcagtatctggtccattccattcatcgctaatgaaagtgattgaagaagatttttcaagttatattaatcaatttgaatggcgtgatgctaagtttcctgtagttcaaaatgtaaatgcgcaaggtgaaactgacaaagaagtaattaaatctaatatggtcaagcaattatattcaccagtacaattcattaactcaacagaatggctaatagaccaaggtgttgatcattttattgaaattggtcctggaaaagttttatctggcttaattaaaaaaataaatagagatgttaagttaacatcaattcaaactttagaagatgtgaaaggatggaatgaaaatgactaagagtgctttagtaacaggtgcatcaagaggaattggacgtagtattgcgttacaattagcagaagaaggatataatgtagcagtaaactatgcaggcagcaaagagaaagctgaagcagtagtcgaagaaatcaaagctaaaggtgttgacagttttgcgattcaagcaaatgttgccgatgctgatgaagttaaagcaatgattaaagaagtagttagccaatttggttctttagatgttttagtaaataatgcaggtattactcgcgataatttattaatgcgtatgaaagaacaagagtgggatgatgttattgacacaaacttaaaaggtgtatttaactgtatccaaaaagcaacaccacaaatgttaagacaacgtagtggtgctatcatcaatttatcaagtgttgttggagcagtaggtaatccgggacaagcaaactatgttgcaacaaaagcaggtgttattggtttaactaaatctgcggcgcgtgaattagcatctcgtggtatcactgtaaatgcagttgcacctggttttattgtttctgatatgacagatgctttaagtgatgagcttaaagaacaaatgttgactcaaattccgttagcacgttttggtcaagacacagatattgctaatacagtagcgttcttagcatcagacaaagcaaaatatattacaggtcaaacaatccatgtaaatggtggaatgtacatgtaatatatttgagctaaagctcaagataaagacgtagtaatcaataaattgataactgataagcggaacgcctgagctaaagctaattgacgcagtggttgactggtcatccaatggagaattgcctgacctagtcaactttgcgggggaaattctaagcaacctagataaggttcgagaatttctccctaagaaacactaatcaataaattgataagaagattagaggaacgcttgagctaaagctcaagataaagacgcagtaatcaataaattgataactgggatagaggtacacctgagctaaagctcatgcataagaaacactaatcaataaattgataagtgtttctaaaatttctacttgttttttagaatttaaaatgggaaaatataatagtctatgtataggcatttttaaaggaggtgaatcgacgtggaaaatttcgataaagtaaaagatatcatcgttgaccgtttaggtgtagacgctgataaagtaactgaagatgcatctttcaaagatgatttaggcgctgactcacttgatatcgctgaattagtaatggaattagaagacgagtttggtactgaaattcctgatgaagaagctgaaaaaatcaacactgttggtgatgctgttaaatttattaacagtcttgaaaaataataaatcttacatctgggtcgtcagtattgtcgactcagtttttttctttaattatcaatagttttaacgtaaaattaaagatgattcaagagcaacacataaaggagataaaataatgtctaaacaaaagaaaagtgagatagttaatcgttttagaaagcgctttgatactaaaatgacagagttaggctttacttatcaaaatattgatttataccaacaagcattttcgcattcgagttttattaatgattttaatatgaatcgtttagaccataatgagcgtttagagtttttgggtgatgcggtattagaattgacggtttcacgatatttatttgataaacatcccaacttgccagaagggaatttaacaaaaatgcgtgccactattgtatgtgagccctcacttgtaatatttgcgaataaaattggattgaacgaaatgattttacttggtaaaggtgaagagaaaacagggggacgtacaagaccatcattaatatcagatgcattcgaagcatttattggggcattgtatttggatcaaggactagatatagtttggaaatttgctgagaaagtcattttcccacatgtagaacaaaatgagttattaggcgtggtagattttaaaacacaattccaagaatatgtgcaccagcaaaataaaggtgatgtaacctataatttaataaaagaagagggaccggcacatcatcgtctattcacttcagaagttattctgcaaggggaagcaatagctgaaggtaaagggaaaacgaaaaaagaatcagaacaacgtgctgctgaaagtgcctataagcaattaaaacaaattaaatagaaatttatatgatacgacatataggtgttcgatttaggatttaaggaagaatttttaatattttatggaacaacttcgaaatttaatatacaaatactaaaatatcgtatacatgtgttctttaaaattgtgataaggagtttaggatggtttatttaaaatcaatagatgccattggatttaagtcttttgcagatcaaaccaatgttcaattcgataaaggtgtaactgcaattgttggtccaaatggaagcggtaaaagtaatattacagatgctattaaatgggtgttgggtgaacaatcggctaaatcattacgtggctcaaaaatggaagatattatcttctcaggtgcagaacatcgcaaagctcaaaattatgctgaagtacagttaagattagataatcattctaaaaagctcagtgttgatgaaaacgaagttattgtaacaagaagattgtatcgaagtggtgaaagtgagtactacataaataatgaccgtgcaagattaaaagatattgccgatttatttttagattctggattgggaaaagaagcgtatagcattatctcgcaaggtagagttgatgaaatactaaatgctaaaccaattgatagacgtcaaattattgaagaatcggctggtgtacttaaatataaaaaacgtaaggctgaatcattaaataaacttgaccaaacagaagataatttaacgagagtagaagacattttatatgatttggaaggtcgcgtagaacctctaaaagaggaggcagctatagctaaagaatataagacactttcacatcaaatgaaacatagtgacattgtagttacagtgcacgatattgatcaatatacaaatgacaatagacaattagatcaacgtttaaatgatttacaaggccaacaagcaaataaagaagctgacaagcaacgtttaagccaacaaattcaacaatataaaggtaaacgtcatcaacttgataatgatgttgaatcgcttaattatcaattagtaaaagctacggaagcctttgaaaaatatacgggacaattaaatgttttagaagaacgtaagaaaaatcaatctgaaacaaatgcacgatatgaagaagaacaagaaaatttaatggagcttttagaaaatatatcaaatgagatttctgaagctcaagatacttataagtctctgaaaagtaaacaaaaagaactcaatgctgtcattcgtgaacttgaagaacaactatatgtttcagacgaagcacatgatgaaaaattggaagaaattaaaaacgaatactatacattaatgtcagagcaatcagatgttaacaatgatattcgttttttaaagcatactatagaagagaatgaggctaaaaaatcaagactagattctcgattagttgaagtttttgagcaattgaaagatattcagggtcaaataaaaacgacaaaaaaagaatatcaacagaccaacaaagaactttctgctgtagataaagaaattaaaaatatagaaaaagacctcactgatacaaaaaaagcacaaaatgaatacgaagagaaattgtatcaagcatatcgatataccgaaaaaatgaaaacacgtattgatagtttggcaacgcaagaggaagaatatacttattttttcaatggcgtcaaacatattttgaaagctaaaaataaagaattaaagggtattcatggtgcagttgcggaaattattgatgtgccatctaaattaactcaggcaattgaaacagcattaggtgcttcattacaacatgtcattgtagattcagaaaaagatggacgccaggctattcaatttttaaaagaacgtaatttaggtcgtgcgacgtttttaccattaaatgttatacagagtagagtggtagcgactgatattaaatctattgctaaagaggcaaacggatttattagtattgcttcggaagcagttaaagtagcaccagaatatcaaaatattatcgggaatttattaggtaatacgattatcgttgatcatttaaagcatgcaaatgaattggcacgtgcgattaaatatcgaactcgtattgttactttggaaggtgatattgtaaatcctggtggttctatgactggtggtggcgctcgtaagtcaaaaagtattctgtctcaaaaagacgagttgacaacaatgagacaccaattagaagattacttgcgtcaaacagaatcatttgaacaacaatttaaagagttgaagataaaaagtgatcaattaagtgaactgtattttgaaaaaagtcaaaagcataatacacttaaagagcaagtgcatcattttgaaatggagctcgatagattaactacacaagaaacacaaataaaaaatgatcatgaagaattcgaatttgaaaaaaatgatggttatacgagtgacaaaagtcgacaaactttgagtgaaaaagaaactcatttagaaagtattaaagcatctttaaaacgactagaagatgaaattgaacgctacacaaaactttctaaagaaggtaaggaaagcgtaactaaaacacaacaaacgttacatcagaaacaatctgatcttgctgtggttaaagagcgtattaaaacacaacaacagacaatagatcgattaaataatcaaagtcaacaaaccaaacatcaattaaatgatgttaaagaaaaaatagcattctttaattcggatgaagtgatgggcgagcaagcttttcaaaatattaaagatcaaattaatggtcaacaagaaacgagaacacgcttatctgatgaattagataaattgaaacaacaacgtattgagttgaatgaacaaatcgatgcgcaagaagctacactacaagtttgtcaccaagatattttagctatcgaaaatcactaccaagatattaaagctgaacaatcaaagctagatgtattaattcatcatgcgatagatcatttaaatgatgaatatcaattgactgttgaacgtgcgaaatctgaatatacgagtgatgaatcgattgacgcattacgtaaaaaagttaagttaatgaagatgtcgattgatgaactaggtcctgtaaacttaaatgcaattgaacaatttgaagagttaaatgaacgttatacatttttaagtgaacaacgtacagatcttcgtaaagctaaagaaacattagagcaaattataagtgaaatggatcaagaggttactgaaagatttaaagaaactttccatgctattcaaggacattttacagctgtgttcaaacaattgtttggtggaggcgatgcagaattgcaattaactgaagccgattatttaacagctggtattgatattgtggtacaaccaccgggtaaaaagttgcaacatttatcgttactgagtggtggtgagcgtgcattaactgctattgctttactatttgcaattttaaaagtaagatctgcaccttttgttatattagatgaggttgaagctgcactagatgaagcaaatgttattagatacgcaaaatatttaaatgagttatcagacgaaacacaattcattgttattacacaccgtaaaggaacaatggaatttgcagataggttatacggtgtaacaatgcaagaatcaggtgttactaaacttgtgagtgtgaatttaaatacaatagatgatgtgttgaaggaggagcaataatgagcttttttaaacgcttaaaagataagtttgcaacaaataaagaaaatgaagaagttaaatccttaacagaagaacaaggtcaagacaaattagaagatacacattctgaaggttcaacgcaggacgtaaatgatttagcagaaaatgctgaagtgaaaaagaagccacgcaagttgagtgaagcggattttgatgacgatggcttaatatcaattgaagattttgaagaaattgaagctcaaaaaatgggggctaaatttaaagcaggactcgaaaaatctcgtcaaaatttccaagaacaattaaataatttgatagcgagatatcgtaaagtagatgaagacttttttgaagctttagaagaaatgttaatcactgcagacgtcggttttaatacagtgatgacgttaactgaagaattacgtatggaagcacaacgacgtaatattcaagatactgaagatttgcgtgaagtcattgttgaaaaaatcgtagagatttaccatcaagaagatgataattcagaagctatgaacttagaagatggtcgtttgaatgtcattttaatggtcggtgtgaatggtgttggtaaaacaacaacaattggaaaattagcttaccgatataaaatggaaggtaaaaaagtaatgttagctgcgggcgatacttttagagcgggtgctattgatcaattgaaagtttggggcgaacgtgttggtgtagacgtaattagccaaagtgaaggttctgatccagctgctgttatgtatgatgcgattaatgccgctaaaaacaaaggtgttgatattttaatctgtgataccgctggacgtttacaaaataaaacaaatctaatgcaagaattagaaaaagttaagcgtgtaattaatcgagcagtgccagatgcgcctcatgaagcattactatgtttagatgctacaactggtcagaatgcgttgtcacaagctagaaactttaaagaagtaacaaatgttacaggtattgtattaacgaaattagatggtacagccaaaggtggtatcgtattagccattcgtaatgaattgcacattccagttaaatatgtaggtttaggtgagcaattagatgacttacaaccatttaaccctgaaagttatgtctacggcttattcgctgatatgattgaacaaaatgaagaaataacaacagttgaaaatgatcaaattgtaacagaagaaaaggacgataatcatgggtcaaaatgatttagttaaaacgttacgaatgaattatttgtttgatttttatcaatccttattgacgaataaacaacgtaattatttggaattattttatctcgaagattattctttaagtgaaatcgcagatacttttaatgtgagtagacaagcagtttatgataatataagaagaactggcgatttagttgaagattatgaaaagaaattggaattataccagaaatttgagcaacgccgagaaatatatgatgaaatgaaacaacatttaagtaatccagaacaaatacaacgttatattcaacaattagaagacttagaatagatataaattgagggaggacatcgatatggcatttgaaggcttatcagaacgcctgcaagcgacgatgcaaaaaatgcgtggtaagggtaaacttactgaagctgatataaagataatgatgcgtgaagtaagattagcgttacttgaggctgacgtaaactttaaagtggtaaaagaatttattaaaacagtatcagaacgcgcattaggttccgatgtaatgcaatcattaacaccagggcaacaagttattaaaatagttcaagatgaattaacgcagttgatgggtggagaaaatacgtcgattaatatgtcaaataaaccacctactgttgttatgatggttggtttacaaggtgctggtaaaacaacaactgcaggtaaattagcattattgatgcgtaaaaaatacaacaaaaaacctatgttagttgcagcagatatttatcgtccagcagcgataaatcaattacaaacagtagggaaacaaattgatattcctgtatacagtgaaggagatcaagtaaagccacaacaaattgtaactaatgcattaaaacatgctaaagaagaacatttagactttgtaatcattgatacagcaggtcgattacacatcgatgaagcattgatgaacgaattaaaagaagtaaaagacattgctaaaccaaacgaaattatgttagttgtcgattcaatgacgggtcaagatgctgtcaatgttgcagaatcttttgacgatcaacttgatgtcacaggtgttaccttaactaaattagatggtgatacacgtggtggtgcagctttatctattcgttcggtgacacaaaaaccaattaaatttgttggtatgagtgaaaagttagatggtttagagctattccatcctgaacgtatggcatcacgtattttaggtatgggtgatgtgttaagtttaattgaaaaagcgcaacaagatgtggatcaagaaaaagcaaaagatttagagaaaaagatgcgtgagtcatcgtttactttagatgattttttagaacaacttgatcaggtgaaaaatctaggaccactggatgatattatgaaaatgattccaggtatgaataaaatgaaagggctagataagcttaatatgagtgaaaagcaaattgatcatattaaagcgattatccagtcaatgacgccggctgaaagaaacaatccagacacattgaatgtatcacgtaaaaagcgtattgctaaagggtctggtcgttcattacaagaagtcaatcgtttgatgaaacaatttaacgatatgaagaaaatgatgaaacaattcactggtggcggtaaaggtaaaaaaggtaaacgcaatcaaatgcaaaatatgttaaaaggtatgaatttaccgttttaatgtttaatataacacgctgatttttgttgcaatgagatgtgcatcccgaaagttatactaaagaatataactttatggggtgcatatttttagatacacaataataattaaaaactgaaattgcggatttgctagaacatgaggttattgttgctaatattaataagttatattggtggaacatgtgcgttagaagtggtaccattcatgtccttacgagataaattaacttaacacgtaggtggtgaaatttactatgaatttttataacctattaacagtctaatttagtaatcacatagttattattgtaagaaaaaggttcaataattttcctggtaaagaaaaaactctttacaaacattcatacacctgttaatattatttcttgtagaaaataaaaattaaaacatgacttaaaggagattttataaatggcagttaaaattcgtttaacacgtttaggttcaaaaagaaatccattctatcgtatcgtagtagcagatgctcgttctccacgtgacggacgtatcatcgaacaaatcggtacttataacccaacgagcgctaatgctccagaaattaaagttgacgaagcgttagctttaaaatggttaaatgatggtgcgaaaccaactgatacagttcacaatatcttatcaaaagaaggtattatgaaaaaatttgacgaacaaaagaaagctaagtaatttagcgtaaaattgttctaacaataagaataactcgtttacactgacagttattactcaatgatacgttgggaatatcacatgttagtaatatagaacgtattgggtaccataatggtgccctttttctttgaattattttcaattaaaatagaagtgttcaaagcatagagttggaggtaatagaatgagagttgaagttggtcaaattgttaacacacatggtattaaaggtgaaattaaagtaaaatccaattcagactttacagacgttcgttttcaacccggtcaagtgctgacagttgtgcataacaataacgaccttgaatatactgttaagtcacatagagtgcataaagggcttcatatgctcacatttgaaggtattaataatattaatgatattgagcatctaaaagggagttctatttatcaagaacgtgatcatgaagatatcgtacttgaggaaaatgaattttattattcagatattataggatgtacagtttttgatgatcaagaaacaccaataggtcgtgtaattaatatatttgaaacaggtgcgaatgatgtgtgggtgattaaaggatctaaagaatatttgattccttatattgctgatgttgtaaaagaagtggatgttgaaaataaaaaaattatcatcacgccaatggaaggattgttggattaatgaaaattgattatttaactttatttcctgaaatgtttgatggtgttttaaatcattcaattatgaaacgtgcccaagaaaacaataaattacaaatcaatacggttaattttagagattatgcaattaacaagcacaaccaagtagatgattatccgtatggtggcggacaaggtatggtgttaaagcctgaacctgtttttaatgcgatggaagacttagatgtcacagaacaaacacgcgttattttaatgtgtccacaaggcgagccattttcacatcagaaagctgttgaattaagcaaggctgaccacatcgttttcatatgtggacattatgaaggttacgatgaacgtatccgaacacatcttgtcacagatgaaatatcaatgggtgactatgttttaacaggtggagaattgccagcgatgaccatgactgatgccattgttagactgattccaggtgttttaggtaatgaacagtcacatcaagacgattcattttcagatggattattagagtttccgcaatatacacgtccgcgtgaatttaagggtctaacagttccagatgttttattgtctggaaatcatgccaatattgatgcatggagacatgagcaaaagttgatccgcacatataataaaagacctgacttaattgaaaaatatccattaactaatgcagataagcaaatattagaaagatataaaataggattgaaaaaaggttagtattgtgctaacataatctgagtgtggaaacacaaaaatcactatgatccgctgctatatatttgtcgaggcaagaacataggttgaagaggagaatttataatgacaaatcacaaattaatcgaagcagtaactaaatcacaattacgtacagacttaccaagtttccgtcctggtgatactttacgtgtacacgtacgtatcattgagggtactcgtgagcgtatccaagtattcgaaggcgttgtaattaaacgtcgtggcggtggcgtttctgaaacgtttacagttcgtaaaatttcatcaggtgttggcgtggaacgtacattcccattacacacaccaaaaattgaaaaaatcgaagttaaacgtcgtggtaaagtacgtcgtgctaaattatattacttacgtagtttacgtggtaaagctgctagaatccaagaaattcgttaatcagcatttaaacaaagctatgtatgagtcaaattcgactcaaacaataaagccatctaggtcacttttatggagtgatatagatggctttttttgctgtttagttaatgtaaatgtttattccttttctattcataacgtgtttgctcaaaatggttatataaacaaaaggctgggacataaatcaatgttctatgctctacgaagttatattggcagtagttgactgaacgaaaatgcacttgtaacaagcctttttcaattctagtcaggggccccaacacagaagctgacgaaaagtcagcttacaataatgtgcaagttggcggggccccaacatagaagctggggaaagtcagcttacaataatgtgcaagttggggtgggacgacgaaataaattttgcgaaaatatcatttctgtcccactcccattaaatatatgcgtagcaacattatttttgtcttgcccatctcgtgaaaataatactacatataatgccgaatatagtaattgttataagtaaataatagtatggtggggtatagctcaattgaatctttgttatatttttaggtgctttaatgccggtcataataccatttacttgttcaactttaagactttgatcacctgatgtcgctttcataccttgattatatgctgttggcaaaacaatatacccagatgaatttttatttttagtaatagtataaccttgctttgtcttactaactttgacagcctctaatgaatttgaagcgtctttaagcgtggtataatcttcgccgtatatcccttttaaatttacacgatacttacctttaggcaatgataatctaatcctatctgaagctttaatgcgtattgttacgggtgttacaaagcgtcgatatttataagtgagtttatttctttcttgtgtatattcattcactttaacatcatgagctttatccggcgaaagtaattctaaatccatttcaaaatacaaatctttaaattgattagaaactgattttggcaactgtacagttagaccaccattattttgtttaacttgtaataaatgttttgtaggagattgccaggctgcactatttaatttaattgttgaatctgatagtaaatttttattggctttaaaatgtgtattaacatctttagtattgttagaaacaatcccttgcaacattgcttgttctttatctaatggagattttaattctttattggaaaagaccttatttgtaatatgtgcacttggataatggatggtatttttagaatgaatccaacgaactttattgtctttgtgttcagagttaattttaaatccatatggtaagttgtcatcatgatttactctaattcgatcattcacattccaaagcgatagtaaattttgacgattgccaagtaatctataagtgctgtttttatcgattggcatattaatttggagtgtcttgtcataatattttaaaatgtctccattaaaaatactagaatataatgaaatgccattataatgatatataaatggtgaatttaatgcatagtctgacatataatcaatgcgattaaatgggcctgttgcattttgatttatcttttttattagctggtttacatagttactatgataatcatgttgtttcaacgttgatattgattgttgataaggtttgattgccatatttttgttgttatctaaaatggcgatttgttgaatcataacgattaatactaatattgcaacggttaattttttataacgccataaactaaattttaaaataacggcaagcaccattagcaggataatacctactataagtgcaagtgggtgtgtcggtgatggtaatacataaagtaatgcgatgatgcttactggtattgttctgattaaataatatttcatatttaatgttgataaatgttgaataaacaatccgcaaagagcacttgatgatagtgctaagatatacacccaacgcctttctggaaatgaaaaaccattaaaagcactgtcgaaatactgtgataatgaacctataaataatatccatgttactattgcgaaaagtctataaaagtaaaaacgatacagtttgaatgacaataatgcaacgatagtaagaattgaaatcgtaatataaaatccatcgctaaagaaaaaataatgataatcaagtggtgtcaaaaacggtatatcaacattgggattttgctttctgtcattttccaaaaacgcagaaatgccagtgaataaaccaaatacacttgataacacactcaaaactgtagcagatatgacgcaaattaatttttgtgttctagagacaatgtcatatttgtaagtgaaaatgagtcgatataaatagtagcaacctataataatagcttgataataactgaaataaaaattgctaaatagtgttaaggctatcgcaacaatgaaaataccgattttgcgttgttgaaaatatctttccaaaccaagaatcgataatggtaataaatataataaatttccataaaatgaccaagtaaaattaaagtatataacgacagttgacatgccgtataaaatcgtagcgatcatatttgttgagcgtttaaagtgtaatattttaaataagtagaaggtcacgacaaatgttatgatagctcgtatcatagccataataagttggtttgtcggccaaaaatgtattgttgtcggattaaatataccaaccgtttctcctattttaatgaatagaaaatttagccacattaaaggtgacagcgaataataatatgatagtcctttcatataatcgccacctaatccaaacgatgcatcatataaactagaaaaactacttagatgttcatacaaatacatttgaaatggcatcatttgacggaatccatctccagccccactaaaaacagtaccattcacaatataatcatagatatgagtagaaaataaaataagcgttaatattacactaatgaaagttataacaaagaattgtttgacgtttgaatttagccacttttttaacacaacattatcctcaactttcaaatttaaaattaagtttaactgaaactaaagttaatgaggttcttgataggtaaagacgaagatgactgtggaacagataccttatcatagttacttaaactttggatcattttcagtttatcattaaacaaatatattgaataataaaaatgtcatactgataaagatgaatgtcacttaataagcagcttagatttattaaatgaaaatttttaattgtagaaaacttgaaataatcacttatacctaaatctaaagcattgttaacaagtgtgacaatgttaaaataaatatagttgaattaatgaatttgttctataattaacaagttatagattttaataatgagaaaagaattgacgaaagtaaggtgaattgaatggttattcaatggtatccaggacatatggcgaaagccaaaagagaagtaagtgaacaattaaaaaaagtagatgtagtgtttgaactagtagatgcaagaattccatatagttcaagaaaccctatgatagatgaagttattaaccaaaaaccacgtgttgttatattaaataaaaaagatatgtctaatttaaatgagatgtcaaaatgggaacaattttttattgataaaggatactatcctgtatcagtggatgctaagcacggtaaaaatttaaagaaagtggaagctgcagcaattaaggcgactgctgaaaaatttgaacgcgaaaaagcgaaaggacttaaacctagagcgataagagcgatgattgttggaattccaaatgttggtaaatccacattaataaataaactggcaaagcgtagtattgcacagactggtaataaaccaggtgtgaccaaacaacaacaatggattaaagttggtaatgcattacaactattagacacaccagggatactttggcctaaatttgaagatgaagaagtcggtaagaagttgagtttaactggtgcgataaaagatagcattgtgcacttagatgaagtagctatatatggattgaactttttaattcaacatgacattgaacgcttaaaagcacattataaaattgacgttccagaatatgcagaaattttagcgtggtttgatgcgatagggaaaaaacgtggcttaattcgacgtggtaatgaaattgattacgaagcagtcattgaactgattatttatgatattcgaaatgctaaaataggaaattattgttttgatatttttaaagatatgactgaggaattagcaaatgacgctaacaattaaagaagttacgcagttgattaatgcggttaatacaatagaagaattagaaaatcatgaatgctttttagatgagcgaaaaggtgttcaaacggcaattactaggcgcagaaaagcgttagaaaaagaacaagctttaaaagaaaagtatgttgaaatgacttactttgaaaatgaaatattaaaagagcatcctaatgctattatttgtggtattgatgaagttggaagaggacctttagcaggtccagtcgttgcatgcgcaacaattttaaattcaaatcacaattatttgggccttgatgactcgaaaaaagtacctgttacgaaacgtctagaattaaatgaagcactaaaaaatgaagttactgcttttgcatatggtatcgcgacagctgaagaaatagatgaatttaatatttataaagctactcaaatcgccatgcagcgagctattgatggattatcagtacaaccaacgcatttattgatagacgcgatgacgcttgataatgcactgcctcaagtatctttaatcaagggtgatgcaagaagtgtgtccattgcagctgcaagtatcatggcgaaggtttttcgtgatgattatatgacacagttatctaaagattatcctgaatacggttttgaaaaaaacgcgggttatggtaccaaacaacatttactagcaatcgatgatattggcattatgaaagagcatagaaaaagctttgaacctataaaatcgttactgtaaatcgtaaaattcaattaaatgataaaaaagtagcatttaagtttacaatagcgcttacattttttataattgtaagggaacttaacctaagtaacaggaggatggaagatgaatatccacgagtatcaaggtaaagaaatatttcgttcaatgggcgttgcagttccagaaggacgagtagcatttactgctgaagaagcggtggagaaagcaaaagaattaaattctgatgtttatgttgtaaaagcacaaattcatgctggaggtagaggtaaagcaggcggagtaaaaattgctaaatctttatctgaggtagaaacatatgcaaaagaattattagggaaaactttggtgacacatcaaactggtccagaaggtaaagaaattaagcgtttatatatcgaagaaggttgtgctattcaaaaagaatattacgttggattcgttattgatcgtgcgactgaccaagtaacattgatggcgtctgaagaagggggcactgagattgaagaagttgcttcgaagactcctgaaaagatcttcaaagaaactatcgatccagtaatcggactttcaccattccaagcaagacgaattgcgtttaatattaatattcctaaagaatctgttaacaaagctgctaaattcttattagcactttataatgtattcattgaaaaagattgttcaatcgtagaaatcaacccattagttacaacagctgatggtgatgtattggcattagatgctaaaattaattttgatgataatgcattattcagacataaagatgttgtagaattacgtgatttagaagaagaagatccgaaagagattgaagcgtctaaacatgatttatcatacattgcattagatggtggcatcggatgtatggttaatggtgcaggtttagccatggcaacaatggatacgattaatcatttcggtggaaacccagccaatttcttagatgcaggcggaagcgctactagagaaaaagtaactgaagcatttaaaatcattttaggtgatgaaaatgttaaaggtatttttgtaaatattttcggtggcattatgaaatgtgatgttatcgcagaaggtatcgttgaagctgtaaaagaagtagatttaactttaccactagttgtacgcttagaaggtacaaatgttgagttaggtaaaaaaatcttaaaagactcaggattagcaattgaaccagcagcaacaatggctgaaggtgcacaaaaaattgttaaactagtcaaagaagcataaggaaaggatgggagcactaagatgagtgtatttatagataagaatactaaagtaatggtacaaggtattacagggtctactgcccttttccatacaaaacaaatgcttgattatggtacgaaaatagtagcaggtgtgacgcctggtaaaggtggtcaagttgttgaaggcgttcctgttttcaacactgttgaagaagctaaaaatgaaaccggggcaacggtttcagtcatttacgttccagcaccatttgctgcagactcaattttagaagcagctgatgcagacttagatatggttatttgtatcactgaacatattcctgtattagacatggttaaagttaaacgctacttacaaggtagaaaaacacgtttagttggtccaaactgtccaggtgtgattacagcagatgaatgtaaaattggtattatgcctggctatattcacaaaaaaggtcatgttggtgtagtatcacgttcaggtacactaacatatgaagcagtgcaccaattgactgaagaaggtattggtcaaactacagctgttggtattggtggagacccagtcaacggaacaaactttattgatgttttaaaagcattcaatgaagatgacgaaacgaaagcagttgttatgattggtgaaatcggtggtacagctgaagaagaagcagctgaatggattaaagcgaatatgacaaaaccagttgtaggctttatcggtggacaaacagcacctcctggaaaacgtatgggacatgctggtgcaatcatttcaggtggtaaaggtactgctgaagagaaaattaaaacattaaatagttgtggtgtgaaaacagcggcaacaccttcagaaattggttcaacattaattgaagctgctaaagaagcaggtatttatgaatcattattaactgttaataaataaagttaaaagatgatataaatggctatagcccattccgtactttataaaagtatcggaaatgggctatttgtcatgcaatgaattttagtacacttttcatatttgggaaaggcaagttaattattttacctcctacaatagctttataaaacaaagtaaattttaattaaaatatatagtacgctatgttataatgtttatatattattgtaaggagtgtttcatcatgaataaacaacaaagtaaagtacgctattcaattagaaaagttagtattggaattttgtcaatttcaataggtatgtttttggcattgggtatgtcgaacaaagcatatgcagatgaaattgataaatctaaagattttacaagagggtatgagcaaaatgtattcgcgaaatcagagttaaatgctaataaaaatacgacaaaagacaaaataaaaaatgaaggtgctgttaaaacatcggacacaagtttaaagttagacaacaaatcagcaatttcaaacggaaatgaaattaatcaagatataaagatttcaaatactccgaaaaactcaagccaaggtaacaatctagttgttaataacaatgaacctactaaagaaattaaaattgcaaacttggaagctcaaaattctaatcaggagaaaatgaataaagttactaataattactttggttactacagttttagagaagctccaaaaacacaaatctatactgtaaaaaaaggagacacacttagtgctatagcattaaaatacaaaactacagtttcaaatattcaaaatacaaataatatagcaaatcctaatttaatatttattggtcaaaaattaaaagtgccaatgacaccattagtagaaccaaaaccaaaaacagtgtcttcaaataataaaagtaatagtaatagcagtacattaaattatttgaaaacattagagaatagaggatgggatttcgacggtagttatggatggcaatgtttcgatttagttaatgtatattggaatcatctttatggtcatggattaaaaggatatggagctaaagatataccatatgcaaataattttaatagtgaagctaaaatttatcacaacacaccaactttcaaagctgaacctggggacttagtggtttttagcggaagatttggtggaggatatggtcatacagctattgtcttaaatggtgattatgatggaaaattaatgaagttccaaagtttagatcaaaactggaataatggtggatggcgtaaagcagaggttgcacataaagttgttcataattatgaaaatgatatgatttttattagaccatttaaaaaagcataatttaaatcgaaggcaggacattgaaatatgaaattttcaactttaagtgaagaagaatttaccaactacaccaaaaagcacttcaaacattatacacagtctatagaattatataattatagaaataaaataaatcatgaagcacatattgtgggagtgaagaatgataaaaatgaagttatagctgcatgtttattaacagaggcacgaatttttaaattctacaaatatttctactctcatagaggtcctttacttgattatttcgatgctaaattagtttgttacttttttaaagaattatctaaattcatttataaaaatagaggagtatttattcttgttgatccatatttaatagagaatttaagagatgcaaatggtaggataataaagaattataataattcagtgatagtaaagatgctagggaaaattgggtatctccatcaaggttatacaacaggatattcaaataaaagtcaaattaggtggatttctgtattggatttaaaagataaagatgagaatcaacttttaaaagaaatggaataccaaactagaagaaatataaaaaagactattgagattggtgttaaggttgaagatttatctattgaagaaacaaatcgattttataaattgtttcaaatggctgaagaaaaacatggttttcatttcatgaatgaagattattttaaacgaatgcaagaaatatataaagataaggcaatgttaaagatagcttgtataaatcttaatgaatatcaagataaattaaaaatacaattattgaaaatcgaaaatgaaatgatgactgtgaacagagcattaaatgaaaatccaaattctaaaaaaaataaatcaaaattaaatcagttaaatatgcaattatctagtattaataatagaattagtaaaaccgaagaactaatatttgaagatggacctgttttggatttagctgctgctttatttatatgtactgatgatgaagtttattatctatcaagtggatcaaatccgaaatataatcagtatatgggtgcatatcatctacaatggcatatgataaaatatgcaaaatcacataatattaataggtataatttttatggaataacaggcgtctttagtaatgaggcggatgattttggtgttcaacaatttaaaaagggttttaatgcacatgttgaagaattaattggtgatttcatcaaaccagtaagaccaattctatataaatttgcaaaacttatttataaggtttaattataaagtatgttggaaattgaaattttaaattctttccaacatacttttcactttttaagtcagtatttttactccttaaaataacattacatcgacaatgtttttgtattagaaatgtaaaacaaaaatagaatatgattttgtatgattacaaaaaggagttgatttattgattaaactatttttgcttaagttatactgggcacacttttcgactaaacaaattcatcaatttttaatggcatatcctaatgtaattaaagaggagggaagaaaaaaagatagttatttatgtgaatgggtgaatagggaagaaaatgttcatttattacgtaaatactatgcttttataaaacttgatcataacgatattattaaagaactgcagaaattaaaagtaagttacattacatatatggattctgaatacccagtgctattaaaagaaatatatcaatttccattacttcttttctataaagggaacatcaaattaataaataatatgcatcatttggcagtagtaggtgcaagagattctacaagttatacccaacagtctttagaatttttattatcaaatgataaaagcaaatatttaacaattgtttccggccttgctcaaggagctgatgcaatggcacatcaaatagctttaaaatacaatctccctacaattgcagttttagcctttggccatcaaacacattatcccaaaagtacattagcattaagaaataaaatagaagaaaaaggtttagttatatccgaatatccaccacatacaccaattgctaaatatagatttcctgagcgcaatagaattatcagcggtttgtcaaaaggggttttaattactgaggctaaggaacaaagtggcagtcacatcacgatagattttgcattagagcaaaatagaaatgtttatgttttacctggatctatgtttaatcctatgacaaaaggtaatttattacgtatccaagaaggtgctaaggtagtattaaacgctaatgatatatttgaagactactatatttaaaactaaaaataatgagttgcttcatatttcttttgttaccctttgtaatttattttttaataaaatctataaaaaatagacagggaaaatgatttgtttagatataaaacgttgacaaaagcaaaattaagcgtttatcatttatctttagtaattagattagcgagggggaaatgacattggcagataatttagtcattgttgaatcgcctgcaaaagcaaaaaccattgaaaagtatttaggtaagaaatataaagttatagcttcaatgggacacgtcagagacttaccaagaagtcaaatgggtgtcgacactgaagataattacgaaccaaaatatataacaatacgcggaaaaggtcctgttgtaaaagaattgaaaaaacatgcaaaaaaagcgaaaaacgtctttctcgcaagtgaccccgaccgtgaaggtgaagcaattgcttggcatttatcaaaaattttagagcttgaagattctaaagaaaatcgcgttgttttcaacgaaataactaaagacgctgttaaagaaagttttaaaaatcctagagaaattgaaatgaacttagtcgatgcacaacaagcgcgtcgaatattagatagattggttggctataacatctcgccagttctatggaaaaaagtaaaaaaaggtttgtcagcgggtcgagttcaatctgttgcacttcgtttagtcattgaccgtgaaaatgaaattcgaaactttaaaccagaagaatattggactattgaaggagaatttagatacaaaaaatcaaaattcaatgctaaattccttcattataaaaataaaccttttaaattaaaaacgaaaaaagatgttgagaaaattacagctgcactagatggagatcaattcgaaattacaaacgtgactaaaaaagaaaaaacgcgtaatccagcaaacccatttacaacttctacattacaacaagaggcggcacgtaaattaaactttaaagcaagaaaaacaatgatggtcgcacaacaattatatgaaggtatagatttgaaaaaacaaggtacgattggtttaataacatatatgagaaccgattctacacgtatttcagatactgccaaagctgaagcaaaacagtatataactgataaatacggtgaatcttacacttctaaacgtaaagcatcagggaaacaaggtgaccaagatgcccatgaggctattagaccttcaagtactatgcgtacgccagatgatatgaagtcatttttgacgaaagaccaataccgattatacaaattaatttgggaacgatttgttgctagtcaaatggctccagcaatacttgatacagtctcattagacataacacaaggtgacattaaatttagagcgaatggtcaaacaatcaagtttaaaggatttatgacactttatgtagaaactaaagatgatagtgatagcgaaaaggaaaataaactgcctaaattagagcaaggtgataaagtcacagcaactcaaattgaaccagctcaacactatacacaaccacctccaagatatactgaggcgagattagtaaaaacactagaagaattgaaaattgggcgaccatcaacttatgcaccgacaatagatacgattcaaaagcgtaactatgtcaaattagaaagtaagcgttttgttcctactgagttgggagaaatagttcatgaacaagtgaaagaatacttcccagagattattgatgtggaattcacagtgaatatggaaacgttacttgataagattgcagaaggcgacattacatggagaaaagtaatcgacggtttctttagtagctttaaacaagatgttgaacgtgctgaagaagagatggaaaagattgaaatcaaagatgagccagccggtgaagactgtgaagtttgtggttctcctatggttataaaaatgggacgctatggtaagttcatggcttgctcaaacttcccggattgtcgtaatacaaaagcgatagttaagtctattggtgttaaatgtccaaaatgtaatgatggtgacgtcgtagaaagaaaatctaaaaagaatcgtgtcttttatggatgttcgaaatatcctgaatgcgactttatctcttgggataagccgattggaagagattgtccaaaatgtaaccaatatcttgttgaaaataaaaaaggcaagacaacacaagtaatatgttcaaattgcgattataaagaggcagcgcagaaataatatttttatttcctagatacattttaaggttgttaaatagaatcattagtgaatcttattttaaagatagtaatggattaatctaaataagtgcggataatataaacataacaacataattaaaagacataaatgacaataaaaggagtatagaaatgactcaaactgtaaatgtaataggtgctggtcttgccggttcagaagcggcatatcaattagctgaaagaggaattaaagttaatctaatagagatgagacctgttaaacaaacaccagcgcaccatactgataaatttgcggaacttgtatgttccaattcattacgaggaaatgctttaactaatggtgtgggtgttttaaaagaagaaatgagaagattgaattctataattattgaagcggctgataaggcacgagttccagctggtggtgcattagcagttgatagacacgatttttcaggttatattactgaaacacttaaaaatcatgaaaatatcacagttattaatgaagaaattaatgccattccagatggatacacaattatcgcaacaggaccacttactacagaaacccttgcgcaagaaatagtggacattactggtaaagatcaactttatttctatgatgcggctgctccaattattgaaaaagaatctattgatatggataaagtttacttaaagtcccgttatgataaaggtgaagctgcatatttaaactgtcctatgactgaggatgaatttaatcgcttttatgatgcagtattagaagctgaagttgcgcctgtaaattcatttgaaaaagaaaaatatttcgagggttgtatgccttttgaagtaatggcagaacgcggacgcaagacattactatttggaccaatgaaaccagtaggattagaagatccaaagactgggaaacgtccttatgcagtggttcaattaagacaagatgatgctgctggcacactctacaatattgtcggcttccaaacgcatttaaaatggggagctcaaaaagaagttattaaattaattccaggtttagaaaatgttgatattgttagatatggtgtgatgcatagaaataccttcattaactcaccggacgtattaaacgagaaatatgaattgatttcacaaccaaacatacagtttgcgggacaaatgactggtgttgaaggttatgtagaaagcgcagctagcggcttagttgcaggtatcaatcttgcgcataaaatattaggcaaaggtgaggtagtatttcctagagaaacgatgattggaagtatggcttactatatttctcatgctaaaaataataagaatttccaacctatgaatgctaacttcgggttattaccatctttagaaactagaattaaagataaaaaagaacgctatgaagcacaagctaatagagctttggattacttagaaaatttcaaaaaaactttataaaatagttagaaagactagatatgctattcattcttaagtcatcaacgagtaagtaatgactttctaaatggaaaatacttatcctagtctttttaattttggaattgttacgtatttctgacaatttagaattcgcattcaaaaaatatctaaataaataacacgcaataagttgattgatgtaacatgtaagagaatgttttaaataaactttatttaaaaggcaatgaaataataaatggcaaggctattaataaagacttttagtaattaatttaaaaaagaggtattctaattaacaggttttccgattagttacaattatttaattctcaaaagatttagaattgattatcaaattactgtaagccctttgctgtatatgctacaattcttattgatggagggtaaatgtattgaatcatattcaagaagcgtttttaaatacattgaaagttgaacggaatttttcggaacatacattgaaatcatatcaagatgacttaattcagtttaatcaatttttagaacaagaacatttacagttgaaaacttttgaatacagagatgctagaaattatttgagctatttatattcaaatcatttgaaaagaacatctgtttctcgtaaaatctcaacgttaagaactttctatgaatattggatgacgcttgatgagaacattattaatccatttgttcaattagtacatccgaaaaaagaaaaatatcttccgcaattcttttacgaagaagaaatggaagcgttatttaaaactgtagaagaggacacttcaaaaagtttacgggatcgagttattcttgaattgttatatgctacaggtatccgtgtttcggaattagttaatattaaaaaacaagatatagatttttacgcgaatggtgttaccgtattaggaaaagggagcaaagagcgctttgtaccgtttggtgcttattgtagacaaagcatcgaaaattatttagaacatttcaaaccaattcagtcatgcaatcatgattttcttattgtaaatatgaagggtgaagcaatcactgaacgcggtgtacgatatgttttaaatgatattgttaaacgaacagcaggcgtaagtgagattcatccccacaagctcagacatacatttgcaacgcatttattgaatcaaggtgcagacctaagaacagtacaatcgttattaggtcatgttaatttgtcaacaactggtaaatatacacacgtatctaaccaacaattaagaaaagtgtatctaaatgcacatcctcgagcgaaaaaggagaatgaaacatgagtaatacaacattacatgcaacaacaatttatgctgtaagacataatgggaaagcagctatggctggagatggacaagtaacgcttggtcaacaagtcatcatgaaacaaacggcaagaaaagtgcgacgtttatatgaaggtaaagtgttagctggtttcgcaggtagtgtagcagatgcgtttacgttatttgaaaaatttgaaacaaaattacaacagtttagtggtaacttagaaagagctgctgttgaattggcacaagaatggcgaggcgataaacaattacgtcaattagaagctatgctaattgtaatggataaagatgctattttagttgtcagtggaactggcgaagttattgccccagatgatgaccttatcgctattggatcaggaggcaactacgcattaagcgcaggacgtgcattgaaacgccatgcatcgcatttgtctgctgaagaaatggcatatgagagcttgaaagtagcggctgatatttgtgtctttaccaacgataatattgttgttgaaacactataataatcagagcacgataaataattacgaccaattaattttagttaaaagacggaggaatgaaattaatggatacagctggaataagattaactccaaaagaaatcgtatctaaattaaatgaatatatcgttggacaaaatgatgctaaacgtaaagtggcaattgccctacgtaatcgatacagaagaagtttattagatgaggaatcaaagcaagaaatttcacctaaaaatattttgatgattggaccaaccggcgttggtaaaactgaaattgcaagaagaatggccaaagttgttggcgcgccatttataaaagtagaagctactaaatttactgaggtaggttatgtaggacgagatgttgaaagtatggttagagatcttgttgatgtttcagtaagattagtcaaggcgcagaaaaaatcattggtacaagatgaagcaacagctaaggccaatgaaaaacttgttaagttattagttccaagtatgaaaaagaaagcgtctcaaacgaataatcctttagagtcacttttcggaggtgcaattccaaatttcggacaaaataacgaagatgaagaagaaccacctactgaggaaattaaaacaaaacgttctgaaattaagagacagctagaagaaggcaaacttgaaaaagaaaaggtaagaattaaagtcgaacaagatcctggtgctttaggtatgctaggtacaaatcaaaatcagcaaatgcaagagatgatgaatcaattaatgcctaaaaagaaagttgagcgagaagttgctgttgagacggcaaggaaaatcttagctgatagttatgcggatgaactaattgatcaagaaagcgctaaccaagaagcgcttgaattagcagaacaaatgggtatcatctttatagatgaaatcgacaaagttgcgacgaataatcataatagtggtcaagatgtctcaagacaaggtgttcaaagagatattttacctatacttgaaggtagcgttattcaaaccaaatatggtactgtgaatactgaacatatgctgtttataggtgctggagctttccatgtatctaagccgagtgacttgataccagaattgcaaggtcgttttccgattagagttgaacttgatagtttatcggtagaagattttgtaagaattttgacagaaccaaaattgtcattaattaaacaatatgaagcattgcttcaaacagaagaagttactgtaaactttaccgatgaagcaattactcgcttagctgagattgcttatcaagtaaatcaagatacagacaacattggtgcacgtcgacttcatacaattttagaaaagatgctagaagatttatcattcgaagcaccaagtatgccgaatgcagttgtagatattaccccacaatatgttgatgataaattaaaatcaatttcaacaaataaagatttaagtgcatttattctataaaaatatacaaaaggagaaaaattcatgagcttattatctaaaacgagagagttaaacacgttacttcaaaaacacaaaggtattgcggttgattttaaagatgtagcacaaacgattagtagcgtaactgtaacaaatgtatttattgtatcgcgtcgaggtaaaattttagggtcgagtctaaatgaattattaaaaagtcaaagaattattcaaatgttggaagaaagacatattccaagtgaatatacagaacgattaatggaagttaaacaaacagaatcaaatattgatatcgacaatgtattaacagtattcccacctgaaaacagagaattattcatagatagtcgtacaactatcttcccaattttaggtggaggagaaagattaggtacattagtacttggtcgagtacatgatgattttaatgaaaatgatttggtactaggtgaatatgctgctacagttattggtatggaaatcttacgtgagaagcatagtgaagtagaaaaagaagcgcgcgataaagctgctattacaatggcaattaattcattatcttattctgaaaaagaagcgattgaacatatctttgaagaacttggcggtacggaaggcctattaatcgcatcaaaagttgcagatagagttggtattactagatctgtaattgtaaatgcactacgtaaattagaaagtgctggtgtaattgaatcacgttctttaggaatgaaaggtactttcattaaagttaaaaaagaaaaattcttagatgaattagaaaaaagtaaataagtcgatgagtctgggacataattcaatgtcctagtcgtgacgatgttatcttggcggtagtcaatgaaatgactttgatgattatgttgaagtcatttctttatttttgtctaattttcaatcaaattgatatttcacattaacttgatagaattaccattaaatttatgaaaaaatgcttgaaaaacatttgctttagacacggcattatgttatatttattttcggctataaagccaatacacacatatcaaacgtgattgtgtaaagggtgcaatatttgtatattgtctttacaatagtttgctatggaggtaattaaccaataggaggaatttataatggcagtaatttcaatgaaacaattactagaagcgggtgttcacttcggtcaccaaacacgtcgttggaacccaaaaatgaaaaaatatatcttcactgagagaaatggtatttatatcatcgacttacaaaaaacagtgaaaaaagtagacgaggcatacaacttcttgaaacaagtttcagaagatggtggacaagtcttattcgtaggaactaaaaaacaagcacaagaatcagttaaatctgaagcagaacgtgctggtcaattctacattaaccaaagatggttaggtggattattaactaactataaaacgatctcaaaacgaatcaaacgtatttctgaaattgaaaaaatggaagaagatggtttattcgaagtattacctaaaaaagaagtagtagaacttaaaaaagaatacgaccgtttaatcaaattcttaggcggaattcgtgatatgaaatcaatgcctcaagcattattcgtagttgacccacgtaaagagcgtaatgcaattgctgaagctcgtaaattaaatattcctatcgtaggtatcgttgacactaactgtgatcctgacgaaattgactacgttatcccagcaaacgacgatgctatccgtgcggttaaattattaactgctaaaatggcagatgcaatcttagaaggtcaacaaggcgtttctaatgaagaagtagctgcagaacaaaacatcgatttagatgaaaaagaaaaatcagaagaaacagaagcaactgaagaataatcaactgttgaatctgacttagatatagtttaaatgggtgataagatattaatgcttatcaccttttttaaaaagaaaatcgaggcaaattacaaatattcaattagagtattggcaatcttgcctataataatgctaaaatcataatatataaaatgataacttattggaggaataatgaatggcaactatttcagcaaaacttgttaaagaattacgtgaaaaaactggcgcgggtatgatggattgtaaaaaagcgctaactgaaactgatggtgacatcgataaagcgattgactacctacgtgaaaaaggtattgctaaagcagctaaaaaagcagaccgtattgcggctgaaggtttagtacatgtagaaactaaaggtaacgacgcagttatcgttgaaatcaactctgaaacagactttgttgctcgtaacgaaggtttccaagagttagttaaagaaatcgctaatcaagtattagatacaaaagctgaaactgttgaagctttaatggaaacaactttaccaaatggtaaatcagttgatgaaagaattaaagaagcaatttcaacaatcggtgaaaaattaagtgttcgtcgttttgctatcagaactaaaactgataacgatgctttcggcgcttacttacacatgggtggacgcattggtgtattaacagttgttgaaggttcaactgacgaagaagcagcaagagacgttgctatgcatatcgctgcaatcaaccctaaatatgtttcttctgaacaagttagcgaagaagaaatcaaccacgaaagagaagttttaaaacaacaagcattaaatgaaggtaaaccagaaaacatcgttgaaaaaatggtggaaggacgtttacgtaaatacttacaagaaatttgtgctgtagatcaagacttcgttaaaaaccctgatgtaacagttgaagctttcttaaaaacaaaaggtggaaaacttgttgacttcgtacgctatgaagtaggcgaaggtatggaaaaacgcgaagaaaactttgcggatgaagttaaaggacaaatgaaataatctgtcataaagtaaaacaaggaagaagacacctttaatgttgctttattaaaatgtaaatcattctaataaaacgacaactgtgtcttctttacttgtatatgttacatatattcacgatagagaggataagaaaatggctcaaatttctaaatataaacgtgtagttttgaaactaagtggtgaagcgttagctggagaaaaaggatttggcataaatccagtaattattaaaagtgttgctgagcaagtggctgaagttgctaaaatggactgtgaaatcgcagtaatcgttggtggcggaaacatttggagaggtaaaacaggtagtgacttaggtatggaccgtggaactgctgattacatgggtatgcttgcaactgtaatgaatgccttagcattacaagatagtttagaacaattggattgtgatacacgagtattaacatctattgaaatgaagcaagtggctgaaccttatattcgtcgtcgtgcaattagacacttagaaaagaaacgcgtagttatttttgctgcaggtattggaaacccatacttctctacagatactacagcggcattacgtgctgcagaagttgaagcagatgttattttaatgggcaaaaataatgtagatggtgtatattctgcagatcctaaagtaaacaaagatgcggtaaaatatgaacatttaacgcatattcaaatgcttcaagaaggtttacaagtaatggattcaacagcatcctcattctgtatggataataacattccgttaactgttttctctattatggaagaagggaatattaaacgtgctgttatgggtgaaaagataggtacgttaattacaaaataaatttagaggtgtaaaataatgagtgacattattaatgaaactaaatcaagaatgcaaaaatcaatcgaaagcttatcacgtgaattagctaatatcagtgcaggaagagctaattcaaatttattaaacggcgtaacagttgattactatggtgcaccaacacctgtacaacaattagcaagcatcaatgttccagaagcacgtttacttgttatttctccatacgacaaaacttctgtagctgacatcgaaaaagcgataatagcggctaacttaggtgtcaacccaacaagtgatggtgaagtgatacgtattgcagtacctgccttaacagaagagcgtagaaaagagcgcgttaaagatgttaagaaaattggtgaagaagctaaagtatctgttcgaaatattcgtcgtgatatgaatgatcagttgaaaaaagatgaaaaaaatggcgacattactgaagatgagttgagaagtggtactgaagatgttcagaaagcaacagacaattcaataaaagaaattgatcaaatgattgctgataaagaaaaagatattatgtcagtataaaactaatatacaatgacatattaaaatgccagtattaaacgataatgtaacatttaaaatgggcatgtttaattaaatcaaagatgcatgtgataatttaaattcacaatgagcataaaaatggtgtttaaacaagttaattaaacatatactttataaataataggcattaggtatattgctataataaagttatgtaatttttaacctcagtatgtatgtcacatttctggtgtaaactgtaccgagtcagactttggtacagtttttttatttgcttattcaatgcattaaatgagtatgataaaatgataatgattgtttagtaacttatactatatgacagagatgatcaggctcggaggaaagaccatgtttaaaaagctaataaataaaaagaacactataaataattataatgaagaattagactcgtctaatatacctgaacatatcgctattattatggatggtaatgggcgatgggctaagaagcgaaaaatgcctagaattaaaggtcattacgaaggtatgcaaacaataaaaaaaattactagggtagctagtgatattggtgttaagtacttaactttatacgccttttccactgaaaattggtcaagacctgaaagtgaagtaaattatattatgaatttgcctgtcaatttcttaaagacattcttaccggaactaattgaaaaaaatgtcaaagttgaaacaattggatttactgataagttgccaaaatcaacgatagaagcaattaataatgctaaagaaaagacagctaataataccggcttaaaattaatatttgcaattaattatggtggcagagcagaacttgttcatagtattaaaaatatgtttgacgagcttcatcaacaaggtttaaatagtgatatcatagatgaaacatatataaacaatcatttaatgacaaaagactatcctgatccagagttgttaattcgtacttcaggagaacaaagaataagtaatttcttgatttggcaagtttcgtatagtgaatttatctttaatcaaaaattatggcctgactttgacgaagatgaattaattaaatgtataaaaatttatcagtcacgtcaaagacgctttggcggattgagtgaggagtagtatagtatgaaagttagaacgctgacagctattattgccttaatcgtattcttgcctatcttgttaaaaggcggccttgtgttaatgatatttgctaatatattagcattgattgcattaaaagaattgttgaatatgaatatgattaaatttgtttcagttcctggtttaattagtgcagttggtcttatcatcattatgttgccacaacatgcagggccatgggtacaagtaattcaattaaaaagtttaattgcaatgagctttattgtattaagttatactgtcttatctaaaaacagatttagttttatggatgctgcattttgcttaatgtctgtggcttatgtaggcattggttttatgttcttttatgaaacgagatcagaaggattacattacatattatatgcctttttaattgtttggcttacagatacaggggcttacttgtttggtaaaatgatgggtaaacataagctttggccagtaataagtccgaataaaacaatcgaaggattcataggtggcttgttctgtagtttgatagtaccacttgcaatgttatattttgtagatttcaatatgaatgtatggatattacttggagtgacattgattttaagtttatttggtcaattaggtgatttagtggaatcaggatttaagcgtcatttcggcgttaaagactcaggtcgaatactacctggacacggtggtattttagaccgatttgacagctttatgtttgtgttaccattattaaatattttattaatacaatcttaatgctgagaacaaatcaataaacgtaaagaggagttgctgagataatttaatgaatctcagaactccttttgaaaattatacgcaatattaactttgaaaattagacgttatattttgtgatttgtcagtatcatattataatgacttatgttacgtatacagcaatcatttttaaaataaaagaaatttataaacaatcgaggtgtagcgagtgagctatttagttacaataattgcatttattattgtttttggtgtactagtaactgttcatgaatatggccatatgttttttgcgaaaagagcaggcattatgtgtccagaatttgcgatcggtatgggaccgaaaatttttagttttagaaaaaacgaaacactttacactattaggttattgcctgttggtggatatgttcgtatggcaggagatggcttagaagagccaccagtcgagcccggtatgaacgttaaaattaaactgaatgaagaaaatgaaataacacatatcatattagatgatcatcataagtttcaacaaattgaagcaatcgaagttaaaaaatgtgattttaaagatgacttattcatagaaggtatcactgcttatgataacgaaagacatcattttaaaattgctagaaagtctttctttgttgaaaatggtagcttagttcaaattgctccgagagacagacaatttgcacataaaaagccatggccgaaatttttaacattatttgcgggaccgttatttaactttatattagctttagtcctatttattggtcttgcatattatcaaggcacgcctacgtctactgtagaacaagtcgcagataagtatccagctcaacaagcaggattacaaaaaggtgataagatcgtccaaattggcaaatataaaatatctgaatttgatgatgttgataaggcgttagataaagttaaagataataagacgactgttaaatttgaacgtgatggtaaaacaaagtcagttgaattaacacctaaaaagactgaaaaaaaactgactaaagtaagttcagagacgaagtatgttctcggattccaaccagcgagtgaacatacactttttaaaccaattgtattcggatttaaaagctttttaatcggtagtacttatatttttacagctgtagtcggtatgttggctagtatatttacgggcggattctcatttgatatgttaaatggtccggttggtatttatcataacgtcgactcagttgttaaagcaggtatcattagcttaattggttacactgcgttgttaagtgtaaacttaggtattatgaatttaattcctattcctgcactagacggtggtcgtattttatttgttatatatgaagcgattttcagaaaaccagttaataaaaaagcggaaacaacgattattgctattggtgccattttcatggtcgttattatgatattagtaacgtggaatgatattcgacgatatttcttataatttaggaggataaataattatgaagcaatccaaagtttttataccaacgatgcgtgatgtgccatcagaagcagaagcacaaagtcatcgtttattattgaaatcgggtttgataaaacaaagtacaagtgggatttatagttatttaccgctagcaacacgtgtgttaaataatattactgcaattgtgcgacaagaaatggaacgtatcgattctgttgaaattttaatgccagcgttacaacaagctgaattatgggaagaatcaggacgttggggtgcatatggcccagaattaatgcgtttacaagatagacatggaagacgatttgcattaggtccaacacatgaagaattagttacatcaatagtaagaaatgaattgaaatcatacaaacaattaccgatgacattattccaaattcaatctaaattccgtgatgaaaagagaccacgttttggtttacttcgtgggcgtgaatttattatgaaagatgcgtattcattccatgctgacgaggcatcattagatcaaacgtatcaagatatgtatcaagcgtatagccgtatttttgagagagtgggcattaacgcaagaccagtagttgcagattcaggtgctataggcggtagccatacacatgaatttatggcattaagtgctatcggtgaggatacaatcgtttacagtaaagaaagtgactatgctgctaatatcgaaaaagcagaagtcgtttacgaaccaaatcataagcatactactgtgcaacctttagaaaaaattgaaacaccaaatgttaagactgcgcaagaattggcagacttcttaggtagaccagtagatgaaatcgttaaaacgatgattttcaaagttgatggcgaatatattatggttttagtgcgtggccatcatgaaattaatgacattaaattaaaatcttatttcggcacagataatattgaattagcaacacaagacgaaattgttaatttagttggtgcaaatccgggttcactaggtcctgttattgataaagaaatcaaaatttatgcagataattttgtgcaagatttaaataatttagttgtcggtgctaacgaagatggctatcacttaattaatgtaaatgtaggtagagacttcaacgttgatgaatatggcgatttccgttttattttagaaggcgaaaagttaagtgatggttcaggcgttgcacattttgctgaaggtattgaagttggtcaagtattcaaattgggtactaagtattcagaatcaatgaatgctacattcttagataaccaaggaaaagctcaacctttaattatgggttgttacggaattggaatttctagaacgctaagtgcgattgttgaacaaaatcacgatgataatggaattgtttggcctaaatcagttactccgtttgatttacatttaatttctattaatcctaagaaagatgatcaacgagaactagcagatgcactatatgctgaatttaatactaaatttgatgtgttgtacgatgatcgtcaggaacgtgcaggtgtcaaatttaatgatgccgatttaattggtttaccactgcgaattgttgttggtaaacgtgcatcggaaggtattgtagaagttaaagaacgtttaacaggtgatagcgaagaagttcacattgatgacttaatgactgtcattacaaataaatatgataacttaaaataattaagatcgaatgaattataagagtaggaaaaagctgaaagaaatctgatgcttatgtcctgctcttattatttttgatataatgattattcgatgaaaaatgactgaagacatagtataattaaagataaatttgttttaacaatataatgattagccaaatataaagcatttaattttctatcattactatgctcacataatctaaatattgttcgaacacgtaaaagtaatttctatttaaggtggtaattgtcttggcaatgacagagcaacaaaaatttaaagtgcttgctgatcaaattaaaatttcaaatcaattagatgctaaaattttaaattcaggtgaactgacacgtatagatgtttctaacaaaaacagaacatgggaatttcatattacattaccacaattcttagctcatgaagattatttattatttataaatgcaatagagcaagagtttaaagatatcgccaacgttacatgtcgttttacggtaacaaatggcacgaatcaagatgaacatgcaattaaatactttgggcactgtattgaccaaacagctttatctccaaaagttaaaggtcaattgaaacagaaaaagcttattatgtctggaaaagtattaaaagtaatggtatcaaatgacattgaacgtaatcattttgataaggcatgcaatggaagtcttatcaaagcgtttagaaattgtggttttgatatcgataaaatcatcttcgaaacaaatgataatgatcaagaacaaaacttagcttctttagaagcacatattcaagaagaagacgaacaaagtgcacgattggcaacagagaaacttgaaaaaatgaaagctgaaaaagcgaaacaacaagataacaacgaaagtgctgtcgataagtgtcaaattggtaagccgattcaaattgaaaatattaaaccaattgaatctattattgaggaagagtttaaagttgcaatagagggtgtcatttttgatataaacttaaaagaacttaaaagtggtcgtcatatcgtagaaattaaagtgacagactatactgactcattagttttaaaaatgtttactcgtaaaaacaaagatgatttagaacattttaaagcgctaagtgttggtaaatgggttagggctcaaggtcgtattgaagaagatacatttattagagatttagttatgatgatgtctgatattgaagagattaaaaaagcgacgaaaaaagataaggctgaagaaaagcgtgtagaattccacttgcatactgcaatgagccaaatggatggtatacccaatattggtgcgtatgttaaacaggcagcagactggggacatccagccattgcagttacagaccataatgttgtgcaagcatttccagatgctcacgcagcagcggaaaaacatggcattaaaatgatatacggtatggaaggtatgttagttgatgatggtgttccgattgcatacaaaccacaagatgtcgtattaaaagatgctacttatgttgtgttcgacgttgagacaactggtttatcaaatcagtatgataaaatcatcgagcttgcagctgtgaaagttcataacggtgaaatcatcgataagtttgaaaggtttagtaatccgcatgaacgattatcggaaacgattatcaatttgacgcatattactgatgatatgttagtagatgcccctgagattgaagaagtacttacagagtttaaagaatgggttggcgatgcgatattcgtagcgcataatgcttcgtttgatatgggctttatcgatacgggatatgaacgtcttggatttggaccatcaacgaatggtgttatcgatactttagaattatctcgtacgattaatactgaatatggtaaacatggtttgaatttcttagctaaaaaatatggcgtagaattaacgcaacatcaccgtgccatttatgatacagaagcaacagcttacattttcataaaaatggttcaacaaatgaaagaattaggcgtattaaatcataacgaaatcaacaaaaaactcagtaatgaagatgcatataaacgtgcaagacctagtcatgtcacattaattgtacaaaaccaacaaggtcttaaaaatctatttaaaattgtaagtgcatcattggtgaagtatttctaccgtacacctcgaattccacgttcattgttagatgaatatcgtgagggattattggtaggtacagcgtgtgatgaaggtgaattatttacggcagttatgcagaaggaccagagccaagttgaaaaaattgccaaatattatgattttattgaaattcaaccaccggcactttatcaagatttaattgatagagagcttattagagatactgaaacattacatgaaatttatcaacgtttaatacatgcaggtgacacagcgggtatacctgttattgcgacaggaaatgcacactatttgtttgaacatgatggtatcgcacgtaaaattttaatagcatcacaacccggcaatccacttaatcgctcaactttaccggaagcacattttagaactacagatgaaatgttaaacgagtttcattttttaggtgaagaaaaagcgcatgaaattgttgtgaaaaatacaaacgaattagcagatcgaattgaacgtgttgttcctattaaagatgaattatacacaccgcgtatggaaggtgctaacgaagaaattagagaactaagttatgcaaatgcgcgtaaactgtatggtgaagacctgcctcaaatcgtaattgatcgattagaaaaagaattaaaaagtattatcggtaatggatttgcggtaatttacttaatttcgcaacgtttagttaaaaaatcattagatgatggatacttagttggttcccgtggttcagtaggttctagttttgtagcgacaatgactgagattactgaagtaaacccgttaccgccacactatatttgtccgaactgtaaaacgagtgaatttttcaatgatggttcagtaggatcaggatttgatttacctgataagacgtgtgaaacttgtggagcgccacttattaaagaaggacaagatattccgtttgaaacatttttaggatttaagggagataaagttcctgatatcgacttaaactttagtggtgaatatcaaccgaatgcccataactacacaaaagtattatttggtgaggataaagtattccgtgcaggtacaattggtactgttgctgaaaagactgcttttggttatgttaaaggttatttgaatgatcaaggcatccacaaaagaggtgctgaaatagatcgactcgttaaaggatgtacaggtgttaaacgtacaactggacagcatccagggggtattattgtagtacctgattacatggatatttatgattttacgccgatacaatatcctgccgatgatcaaaattcagcatggatgacgacacattttgatttccattctattcatgataatgtattaaaacttgatatacttggacacgatgatccaacaatgattcgtatgcttcaagatttatcgggcattgatccaaaaacgatacctgtagatgacaaagaagtcatgcaaatatttagtacacctgaaagtttaggtgttactgaagatgaaattttatgtaaaacaggtacgtttggggttccagaattcggtacagggttcgtgcgtcaaatgttagaagatacaaagccaacaacattttctgaattagttcaaatctcaggattatctcatggtacagatgtgtggttaggcaatgctcaagaattaattaaaaccggtatatgtgatttatcaagtgtaattggttgtcgtgatgatatcatggtttatttaatgtatgctggtttagaaccatcaatggcttttaaaataatggagtcagtacgtaaaggtaaaggtttaactgaagaaatgattgaaacgatgaaagaaaatgaagtgccggattggtatttagattcatgtcttaaaattaagtacatgttccctaaagcccatgcagcagcatacgttttaatggcagtacgtatcgcatatttcaaagtacatcatccactttattactatgcatcttactttacaattcgtgcgtcagactttgatttaatcacgatgattaaagataaaacaagcattcgaaatactgtaaaagacatgtattctcgctatatggatctaggtaaaaaagaaaaagacgtattaacagtcttggaaattatgaatgaaatggcgcatcgaggttatcgcatgcaaccgattagtttagaaaagagtcaggcgttcgaatttatcattgaaggcgatacacttattccgccgttcatatcagtgcctgggcttggcgaaaacgttgcgaaacgaattgttgaagctcgtgacgatggcccatttttatcaaaagaagatttaaacaaaaaagctggattatctcagaaaattattgagtatttagatgagttaggctcattaccgaatttaccagataaagctcaactttcgatatttgatatgtaaaatgaaataatcaaggtatttatttaatgcgtatggcgtagttaaagaaatacaaaattgttgctggacataaaattatgcctgtatttcttttcaacgtcttacgagtctattcgaatgtaatggtgaaataaatgaacaaacttttacaagaatctctgattaatagtgaagtcatttgtttcaagcataaacttatgctataattaagttgcttaaaaattagtgaactcaggcagaagagtgggagattcccgctcttttctatttgccaaaaagggaggcctgtatgagtaaaattacagaacaagtagaagtgattgttaaaccaattatggaagacttgaattttgaacttgtagacgttgaatatgtcaaagagggtagagatcattttcttagaatctctattgataaagaaggtggcgtagatttaaatgattgtacgctagcttctgaaaaaataagtgaagctatggatgcaaatgatcctattcctgaaatgtattatttagacgtagcgtcacctggtgcagaacgtccaattaaaaaagaacaagatttccaaaatgcaataactaaacctgtatttgtttctttatatgtaccaattgaaggtgaaaaggaatggttaggcattttacaagaagtcaataatgaaacaattgtagtacaagttaaaatcaaagcaagaacgaaagatatagagataccgagagacaaaatagcaaaagcacgtcacgcagttatgatttaacgtgatgaggaggaaaaaacgtgtcaagtaatgaattattattagctactgagtatttagaaaaagaaaagaagattcctagagcagtattaattgatgctattgaagcagctttaattactgcatacaaaaagaattatgatagtgcaagaaatgtccgtgtggaattaaatatggatcaaggtactttcaaagttatcgctcgtaaagatgttgttgaagaagtatttgacgacagagatgaagtggatttaagtacagcgcttgttaaaaaccctgcatatgaaattggtgatatatacgaagaagatgtaacacctaaagattttggtcgtgtaggtgctcaagcagcgaaacaagcagtaatgcaacgtcttcgtgatgctgaacgtgaaattttatttgaagaatttatagacaaagaagaagacatacttactggaattattgaccgtgttgaccatcgttatgtatatgtgaacttaggtcgtatcgaagctgttttatctgaagcagaaagaagtcctaacgaaaaatatattcctaacgaacgtatcaaagtatatgttaacaaagtggaacaaacgacaaaaggtcctcaaatctatgtttctcgtagccatccaggtttattaaaacgtttatttgaacaagaagttccagaaatttacgatggtactgtaattgttaaatcagtagcacgtgaagctggcgatcgctctaaaattagtgtcttctctgaaaacaatgatatagatgctgttggtgcatgtgttggtgccaaaggcgcacgtgttgaagctgttgttgaagagctaggtggcgaaaaaatcgacatcgttcaatggaatgaagatccaaaagtatttgtaaaaaatgctttaagcccttctcaagttttagaagttattgttgatgaaacaaatcaatctacaatagttgttgttcctgattatcaattgtcattagcgattggtaaaagaggacaaaacgcacgtctagctgctaaattaaccggctggaaaattgatattaaatcagaaacagatgcgcgtgaagcgggtatctatccagtagttgaagctgaaaaagtaactgaagaagatgttgctttagaagatgctgacacaacagaatcaaccgaagaggtaaatgatgtttcagttgaaacaaatgtagagaaagaatctgaataataggttggagtgaagtatctatgaaaaagaaaaaaattccgatgcgaaaatgtattctttcaaatgaaatgcatcccaaaaaagatatgattcgtgttgttgttaataaagaaggcgaaatctttgcggatgttactggaaagaaacaaggccgtggcgcatatgtttctaaagatgttgctatggttgaaaaagcacaacaaaaagaaattttagaaaaatattttaaagcatctaaagagcaattggatcctgtttacaaagaaattattagattaatttatagagaagagatcccaaaatgagtatagatcaaatattaaactttttaggattagcaatgagagctggtaaagtaaaaacaggtgaatcagtcattgttaatgagattaaaaaaggaaatttgaagctcgttattgttgcaaatgatgcgtctgataatacagctaaattaattacagataaatgtaagagttacaaagttccattcagaaagtttggaaatcgaaatgaattgggaatagcacttggaaaaggtgagcgtgttaatgtagggattactgacccaggctttgctaaaaagttgctatcaatgatagatgaatatcataaggagtgattatatgagtaaacaaagaatttacgaatatgcgaaagaattaaatctaaagagtaaagagattatagatgagttaaaaagcatgaatattgaggtttcaaatcatatgcaagctttggaagatgaccaaattaaagcattagataaaaagttcaaaaaagaacaaaagaacgacaataaacaaagcactcaaaataatcaccaaaaatcaaacaatcaaaaccaaaataaagggcaacaaaaagataacaaaaagaatcaacaacaaaataataaaggcaacaaaggcaataaaaagaataatagaaataataagaaaaataacaagaataataaaccacaaaatcaaccagctgctccaaaagaaataccatcaaaagtgacatatcaagaaggtattacagtaggcgaatttgcggataaattaaatgttgaatcatcagaaattatcaaaaaattattcttacttggtattgttgctaatatcaatcaatcattaaatcaagaaacaatcgaattaattgccgatgattatggcgttgaggttgaagaagaagttgtgattaatgaagaagatttatcaatctacttcgaagacgaaaaagatgatccagaagcaattgagagaccagcagttgtaacaattatgggacatgttgaccatggtaaaactactttattagattcaattcgtcatacaaaagttacagcaggtgaagcaggcggaatcactcaacatattggtgcatatcaaattgaaaacgatggcaaaaaaatcactttcttagatacaccgggacatgctgcatttacaacgatgcgtgcgcgtggtgcacaagtaacagatattacaattttagtagttgcagctgacgatggtgttatgccacaaacaattgaagcaattaaccatgctaaagaagcagaagtaccaattattgttgcagtaaataaaattgataaaccaacttcaaatcctgatcgagttatgcaagaattaactgaatatggtttaattcctgaagattggggcggcgaaacaattttcgttccactttctgcattaagtggtgatggtatcgacgatttattagaaatgataggattagttgcagaagttcaagaacttaaagcaaatcctaaaaaccgtgctgttggtacagttatcgaagctgaattagataaatcacgtggtccttctgcatcattattagtacaaaacggtacattaaatgttggtgatgcgattgtagttggtaatacttacggccgtatccgtgcaatggttaatgacttaggtcaaagaatcaaaacggctggtccatcaacgcctgttgaaattacaggtattaatgatgtgccacaagctggggatcgctttgttgtatttagtgatgaaaaacaagctcgtcgtattggtgaatcaagacacgaagctagcattgtacaacaacgtcaagaaagtaaaaatgtttcattagataacctgtttgaacaaatgaaacaaggtgaaatgaaagatttaaacgttattattaaaggtgatgttcaaggttctgttgaagctttagctgcatcattaatgaaaattgatgttgaaggcgtaaatgttcgtatcattcatacagcggttggtgcaattaatgagtcagacgtgacacttgctaatgcctcaaatggtattatcattggtttcaatgttcgtccagacagtggtgcaaaacgtgctgcagaagctgaaaatgttgatatgcgtttacacagagttatttataatgttatcgaagaaattgaatcagcgatgaaaggtttacttgatccagaatttgaagaacaagttatcggacaagctgaagttcgtcaaacattcaaagtttctaaagttggtactattgctggatgttatgttactgaaggtaaaattacgcgaaatgctggtgtacgtattatccgtgatggtattgttcaatatgaaggcgaattagatacacttaaacgtttcaaagatgatgctaaggaagttgcaaaaggttatgaatgtggtattacaattgaaaactacaatgaccttaaagaaggcgatgttatcgaagcatttgaaatggttgaaattaagcgttaattaaataaattacaagctaaaagtatagttaagattgatatgctccctataaatattgcactttttaagtgtctactttatagggagcatatttgatactagcttttggttttttattagaatagattacctattaaaagttacgttatatggacatgattttgtataaaattttgtggtggcctagaatgatttttaatgacaaaatataatgtcgactattattggaaaattttctgttgaaatgcctatcttacggcaaactttatttgattttataggcttaatttattaaaataacgtgtgagctaaaataattgtttaagcattgttacactaaaaaatgtaaataacaattgaacttaaagataaagaggtgacaagaatgagcagtatgagagcagagcgtgttggtgaacaaatgaagaaggaattaatggatatcatcaacaataaagtcaaagatcctcgagttggttttattacaattacagatgttgttttaacaaatgatttatcgcaggctaaagtatttttaactgtattaggtaacgataaagaagtagaaaatacatttaaagcacttgataaagcaaaaggcttcattaagtctgaattaggttctagaatgcgattacgtattatgccggaattaatgtatgaatatgatcaatcaatcgaatatggtaataaaattgaacgaatgattcaagatttacacaaacaagatagataatttagtgttaggtatctggaaaatgtttgataatttcttaatatcggtatattaacattaaacagttaatacatagatgtgtagaaatagttaacattttccagtttttttatgaataaattcagttgatacgctattaaaatatattttaaaaaagaaggtgactatatgtataatgggatattaccagtatataaagagcgcggtttaacaagtcatgacgttgtattcaaattgcgtaaaatattaaaaactaaaaaaataggtcacacgggtacgcttgatcccgaagttgcaggcgtgttaccggtatgtataggtaatgcaacgagagttagtgattatgttatggatatgggcaaagcttatgaagcaactgtatcgataggaagaagtacaacgactgaagatcaaacgggtgatacattggaaacaaaaggtgtacactcagcagattttaataaggacgatattgaccgattgttagaaaattttaaaggtgttattgaacaaattccgccaatgtattcatcagtcaaggtgaatggtaaaaaattatatgaatatgcgcgtaataatgaaacagttgaaagaccaaagcgtaaagttaatattaaagacattgggcgtatatctgaattagattttaaagaaaatgagtgtcattttaaaatacgcgtcatctgtggtaaaggtacatatattagaacgctagcaactgatattggtgtgaaattaggctttccggcacatatgtcgaaattaacacgaatcgagtctggtggatttgtgttgaaagatagccttacattagaacaaataaaagaacttcatgagcaggattcattgcaaaataaattgtttcctttagaatatggattaaagggtttgccaagcattaaaattaaagattcgcacataaaaaaacgtattttaaatgggcagaaatttaataaaaatgaatttgataacaaaattaaagaccaaattgtatttattgatgatgattcagaaaaagtattagcaatttatatggtacaccctacaaaagaatcagaaattaaacctaaaaaagtctttaattaaaggagatagaatttatgaaagtcatagaagtgacacatcctatacaatctaaacagtatattacagaggatgttgcaatggcattcggatttttcgatggcatgcataaaggtcatgacaaagtctttgatatattaaatgaaatagctgaggcacgcagtttaaaaaaagcggtgatgacatttgatccgcatccatctgtcgtgttgaatcctaaaagaaaacgaacaacgtatttaacgccactttcagataaaatcgaaaaaattagccaacatgatattgattattgtatagtggttaatttttcatctaggtttgctaatgtgagcgttgaagattttgttgaaaattatataattaaaaataatgtaaaagaagtcattgctggttttgattttacttttggtaaatttggaaaaggtaatatgactgttcttcaagaatatgatgcgtttaatacgacaattgtgagtaagcaagaaattgaaaatgaaaaaatttctacaacttctattcgtcaagatttaatcaatggtgagttgcaaaaagcgaatgatgctttaggctatatatattctattaaaggcactgtagtgcaaggtgaaaaaagaggaagaactattggcttcccaacagctaacattcaacctagtgatgattatttgttacctcgtaaaggtgtttatgctgttagtattgaaatcggcactgaaaataaattatatcgaggggtagctaacataggtgtaaagccaacatttcatgatcctaacaaagcagaagttgtcatcgaagtgaatatctttgactttgaggataatatttatggtgaacgagtgaccgtgaattggcatcatttcttacgtcctgagattaaatttgatggtatcgacccattagttaaacaaatgaacgatgataaatcgcgtgctaaatatttattagcagttgattttggtgatgaagtagcttataatatttagagttgcgtatagttatataaacaatctataccacacctttttcttagtaggtcgaatctccaacgcctaactcggattaaggagtattcaaacattttaaggaggaaattgattatggcaatttcacaagaacgtaaaaacgaaatcattaaagaataccgtgtacacgaaactgatactggttcaccagaagtacaaatcgctgtacttactgcagaaatcaacgcagtaaacgaacacttacgtacacacaaaaaagaccaccattcacgtcgtggattattaaaaatggtaggtcgtcgtagacatttattaaactacttacgtagtaaagatattcaacgttaccgtgaattaattaaatcacttggtatccgtcgttaatcttaatataacgtctttgaggttggggcatatttatgttccaaccttaatttatattaaaaaagctttttacaaatattaacatttattatatgttaagctaatattgagtgaataataaggttataatgagataaagatgatataagtacacctagagtaataatcaagatattaaaaataaagtatgtttttttaaaaaatataacttatatttatactgataagggtgggacgataagtctattttgtaaataatagatggatatcccgctctctttttttccaattcaatattttataactaatattaaaatacgataataaatgatatgatataactattagattcaagagaggagatttataatgtctcaagaaaagaaagtttttaaaactgaatgggcaggaagatctttaacgattgaaacagggcaattagctaaacaagcaaatggcgctgtattggttcgttatggagatacagtcgtgttatcgacggcaactgcatcaaaagaacctcgtgatggagatttcttcccattaacagtgaactatgaagaaaaaatgtacgctgcgggtaaaattcctggtggatttaaaaagagagaaggacgtcctggtgacgatgcaacattaactgcgcgattaattgatagaccaattagacctttattccctaaaggatataagcatgatgttcaaattatgaacatggtattaagtgcagatcctgattgttcaccacaaatggctgcaatgattggttcatctatggcgcttagtgtgtcggatattccattccaagggccaatcgccggtgtaaatgtgggttatattgacggtaaatatatcattaacccaacagtagaagaaaaagaagtttctcgtttagaccttgaagtagctggtcataaagatgcagtaaacatggtagaggcaggcgctagtgagattactgaacaagaaatgttagaggcgattttctttggtcatgaagagattcaacgtttagttgatttccaacaacaaatcgtcgaccacattcaacctgttaaacaagaatttattccagcagagcgtgatgaagcgctagttgaacgtgtaaaatctttaaccgaagaaaaaggacttaaagaaacagttttaacatttgataaacaacaacgagatgaaaatcttgataacttaaaagaagaaatcgtcaatgaatttatcgatgaagaagatccagaaaatgaattacttattaaagaagtttatgcaattttaaatgaattagtgaaagaagaagttcgacgtttaattgcagatgaaaaaattagaccagacggccgtaaacctgatgaaatccgtccattagattctgaagttggtattttacctagaacgcatggttcaggtctatttacacgtggtcagactcaagcactttcagttttaacattaggtgctttaggcgattatcaattaattgatggtttaggacctgaagaagaaaaaagattcatgcatcattacaacttcccgaatttttcagtaggtgaaactggtccagtacgtgcgccaggtcgtcgtgaaattggacatggtgcgttaggtgaaagagcattaaaatatattattcctgatactgctgatttcccatatacaattcgtattgtaagtgaggtacttgaatcaaacggttcatcatctcaagcgtcaatttgtggatcaacattagcattaatggatgcgggcgtaccgattaaagcaccagttgctggtattgctatgggtcttgttacacgtgaagatagctatacgattttaactgatatccaaggtatggaagatgcattaggtgatatggactttaaagtcgctggtactaaagaaggtattacagcaattcaaatggatattaaaattgacggtttaacgcgtgaaattatcgaagaggctctagaacaagcgagacgtggtcgtttagaaataatgaatcatatgttacaaacaattgatcaaccacgtactgaattaagtgcttacgcgccaaaagttgtaactatgacaattaaaccagataagattagagatgttatcggacctggtggtaaaaaaattaacgaaattattgatgaaacaggcgttaaattagatattgaacaagatggtactatctttattggggccgttgatcaagctatgataaatcgtgctcgtgaaatcattgaggaaattacacgtgaagcggaagtaggtcaaacttatcaagccactgttaaacgtattgaaaaatacggtgcgtttgtaggcctattcccaggtaaagatgcgttgcttcacatttcacaaatttcaaaaaatagaattgaaaaagtggaagatgtattaaaaatcggtgacacaattgaagttaagattactgaaattgataaacaaggtcgagtaaatgcttcacatagagcattagaagaataatatttaaagtcatatgacgacaatgtatcgtcatgtgattttttttatgccattttttacgaagtgatccattttgaatttgttgtattgaacattttaaaacgctttattattttgtgtgcaactgttaattatcctgtatgtatagtgattaatagtgtacatcaagtgttttttaacttataatgaatagtgagtttatatatggacgggtaacaaatttaggaggtaagattttgagtttaataaagaaaaagaataaagatattcgcattataccattaggcggtgttggcgaaattgctaaaaatatgtatatcgttgaagtagacgatgaaatgtttatgttagatgctggacttatgtttccagaagacgaaatgctaggtattgatattgttataccagacatttcatacgtacttgaaaataaagataaattgaagggtatattccttacacacggacatgagcacgcgattggtgcagtgagttatgttttagaacaattagatgcaccagtatatggatctaaattgacaatagcgttaattaaagaaaatatgaaagcccgtaatattgataaaaaagttcgctactacacagttaataatgattcaattatgagattcaaaaacgtgaatattagtttctttaatacgacacacagtattcctgatagtctaggtgtttgtattcatacttcatatggtgccattgtgtatacaggtgaatttaagtttgaccaaagtttacatggacattatgcaccagatattaaacgtatggcagagattggtgaagaaggcgtatttgtcttaatcagtgattctactgaggcagagaaacctggatataatactccggaaaatgtgattgaacatcatatgtatgacgcttttgcaaaagtgcgaggtcgcttgattgtttcatgttatgcttcgaactttatacgtattcagcaagttttaaatattgctagcaagctaaatcgtaaagtgtcatttttaggaagatcacttgaaagttcatttaatattgctcgtaaaatggggtatttcgacattcctaaagatttgctaattcctataacagaagttgataattatcctaaaaatgaagtgataattatagctactggtatgcaaggagaacctgtagaagccttaagtcaaatggcgcaacataagcataaaattatgaatatcgaagaaggcgattctgtatttttagcaattacggcttctgctaatatggaagttatcattgcgaatacattaaatgagcttgtacgtgctggcgcacatattattccaaataacaagaagattcatgcttcaagtcatggttgcatggaagaattaaaaatgatgattaatattatgaaacctgaatactttattcctgtacaaggtgaatttaaaatgcagatagcacatgcgaagctagcagctgaagcaggtgttgcaccagaaaagattttccttgtggaaaaaggagatgtcattaattacaacggtaaagatatgatattaaatgaaaaggtaaattcaggaaatattttaatagatggtattggtattggggatgtaggaaatatcgtgttgagagaccgtcatcttttagcagaagatggtatctttattgctgtagtaacgttagatcctaaaaatagacgtatagctgcgggacctgaaattcaatctcgtgggtttgtatatgtacgtgaaagtgaagacttattacgtgaagcagaagagaaagtacgtgaaatagtagaggctggtttacaagaaaaacgcatagaatggtctgaaattaagcaaaatatgcgtgatcaaattagtaaactattattcgaaagtacaaaacgtcgtcctatgattattccagtaatttctgaaatttaatcaaaaagtcattaacataaaagaggtcagaacaagtcactgaaatataatggttgtcatggacaatttacttatattttatgatggtcaattgaaggggtaacgattaatctgttatcttaagtaaattgatacatagatgatattgttctaacctctttcatcgtctgtttggactacatattctaaacatcaaataggaaattatatataataacgtcgttttaactaaggcaacataaggaggtgcgtcaattggcacaagcaaaaaagaaatcgacagctaagaaaaaaacaacatcaaaaaaaagaacaaattcgaggaaaaagaagaatgataatccgatacgttatgtcatagctattttagtagttgtattaatggtgttgggtgttttccaattaggaataataggtcgtctaattgacagcttctttaattatttatttgggtacagtagatatttaacatatattttagtactcttagcaactggttttattacatactctaaacgtattcctaaaactagacgaacggctggttcgattgtattgcaaattgcattgctatttgtatcacagttagtttttcattttaatagtggtatcaaagctgaaagagaacctgtactttcttatgtgtatcagtcataccaacacagtcatttcccaaattttggtggcggtgtattaggcttttatttattagagttaagcgtacctttaatttcattatttggtgtatgtattattactattttattattatgctcaagtgttattttattaacaaaccatcaacatcgtgaagttgcaaaagttgcactggaaaatataaaagcttggtttggttcatttaatgaaaaaatgtcggaaagaaaccaagaaaaacaattgaagcgtgaagaaaaagcaagacttaaagaagaacaaaaggcacgtcaaaatgaacagccacaaataaaagatgtgagtgattttacggaagtgcctcaagaaagagatattccaatttatgggcatactgaaaatgaaagtaaaagccagagtcaaccaagtcgaaaaaaacgagtgtttgatgcagagaatagttcgaataacatcgtaaatcatcatcaagcagatcagcaagaacaattaacagaacaaactcataacagtgttgaaagtgaaaacactattgaagaagctggtgaagttacgaatgtatcgtatgttgttccaccgttaactttacttaatcaacctgcaaaacaaaaagcaacatctaaagctgaagtgcaacgtaaaggacaagtactagagaatacattaaaagattttggggtaaatgcaaaagtgacacaaattaaaattggtcctgcagtaactcaatatgaaattcaaccagctcaaggggttaaagtgagtaaaattgtaaacttgcataatgatattgcattagctttagcagcaaaagatgttagaatcgaagcgccaatacctggtcgctctgcagtaggtattgaagtgccaaatgagaaaatttcattagtttcactaaaagaagttttagatgaaaaattcccgtctaataataaactagaagttggattaggaagagatatatcaggtgatccaattactgttccactaaatgaaatgccacacttattggtggcaggatcgacgggtagtggtaaatctgtttgtataaatggtattattacaagtattttattaaatgctaagccgcatgaagttaaacttatgttaatcgatccgaaaatggttgaactaaatgtttataacggaattccacatttattaattccggttgttacaaatcctcataaagctgctcaagctttagaaaaaattgtagctgagatggaaagacgttatgatttattccaacattcatcaactagaaatattaaaggttataacgaattaatccgtaagcaaaatcaagaattagatgagaagcaaccagaattaccttatatcgttgttattgtagatgagcttgcagatttaatgatggtagctggtaaagaagttgaaaatgcgattcaacgtatcacacaaatggcacgtgcagcaggtatacatttgattgtagcaacacaaagaccttctgtggatgtaattacaggtatcattaaaaataacattccatctagaattgcttttgctgtgagttctcaaacagattcaagaactattattggtactggcggcgcagaaaagttacttggtaaaggtgacatgttatacgttggaaatggtgactcatcacaaacacgtattcaaggggcgtttttaagtgaccaagaggtgcaagatgttgtaaattatgtagtagaacaacaacaggcaaattatgtaaaagaaatggaaccagatgcaccagtggataaatcggaaatgaaaagtgaagatgctttatatgatgaagcgtatttgtttgttgttgaacaacaaaaggcaagtacatcattgttacaacgccaatttagaattggttataatagagcatctaggttgatggatgatttagaacgcaatcaggtaatcggtccacaaaaaggaagcaagcctagacaagttttaatagatcttaataatgacgaggtgtaaaaaaatgtcagaaatgaatgcggtatataacgttaaacaatacattttaaatttgattaagcaaaataaattggaatatggtgaccaacttccaagtaatttatcaattgccagagaattaaatgtaaaaaccgacgatgtttatgaagcaattcaggcattgattactgaacaagtcattaaagataattttgaagagggcacaagtgttaagtcactgccccctttcttttatccattgaatgaacttataagtattgggcaaatgattaaaaatgcaggatttgaatgcggaactgaatacttaaattttgatgagcaaccagcaactatgttagatgcaaatttgttgagcgttgaagaaggatatccagtaaccattatagaacgattacgaactgccgatggagaaccggtcgtctattgtttagataaaattgctaaaaaagaattaacatgtacagagtatcaaatgagcaatggatcgattctaagtgcgataaaagaacaaagtaatcataatatttgttatgctgatacagaaattgaagcggtaaattatgaacctcgaatatccgaagtactgaatgcttcgccacacgaaggtttgattttattaaaaattacgcactataatgaatcagatgaacctattttgtattcattaaattatatgaaaaatagcttagttcaatttaaaatcactagaaaaatatagatgtaagaagatatagaggaggctatatatttgagtagacaatctcaaccaaatatacatatcaaagtttcaccaacaactaaatttaaaacaactactatagtttttaaatttatggcacctttagaatatgacacaataacagctagatcattattaagcaaattattagttcgagcaactaagaaatggccaaccgataagtcgtttaataatcacttagccgatttatatggtgcgtatgtgaatagtacaatttcaaaattcaaagatcagcatgtcattacattttcattagaaattgttaatgaacgttatttaagaaacggtgaatcattatttaatcaaggattagatttattacaagaaatcatttggaatccattaattgaaaataaagcattcaatgataattttgttaaccaagagaaaacattattagcaaaaaaaatagaagcaatggtagataataaagcacaatattcgtttttaaaattactcgaccatatgtttgaaaatgaagcatataaatacttatctacaggacaactagaacaaatcccacatattactgctgaaacactatatcatacatatcaatcaatgattaataatgatcaatgttctgtttatgttgtcggcaatgtagaacctgaaagtgttgagaaacaaatacgtgaaaaatttgcacttaaaccattcgataaacatcaattccaacattctactcatcatttacacgatgaagaagttgattatattgttgaatatgatgacgtggatcaagctaaattaaatatgggataccgttttccaacacaatatggacaaagtggatatgctgcctttgttgtatttaacatgatgtttggaggagatccttcatctgttttatttaatgaagtgcgagaaaagcaaagtttagcgtactctatacattcacaaattgatggcaaaaatggctatttatttgttttgagtggggtttcaagtgataagtacgaaactgcaaaagacactattataagtgaatttgaaaaaataaaagcaggagatttcactgaagaaaaattagagttagctaaaaaagtaatcatttctcatcgatatgaatctgaagatcgtccgaaaagtattatagagattatgcataaccaaatattattagagcaaccacaaagcaaagaaacatttataaatgatatacagaaggtaagtcgcgaagatattgtttctgttgctgaaaaagcatttttagatacaatctatgtgttgacaaaaggaggggataaataatgaaagagcgttattatgaattaatagacgaaagagtattcgaacaagaattagaaaatggtttacgattatttattatccccaaaccaggttttcaaaagacatttgtcacttacactacacaatttggttcattagataatcaattcaaaccccttggacaagaccaatttgttactgtacctgatggagttgctcactttttagaacataaattatttgaaaaagaagaagaagacttatttactgcgtttgctgaagataatgcacaagcaaatgcgtttacaagctttgatcgtacaagctacttgttcagtgcaactgataatattgaaaacaacattaaacgtttacttacaatggttgaaacgccttattttacaaaagaaactgttgataaagaaaaaggtattattgcagaagaaataaaaatgtatcaagaacaacctggatataaattaatgtttaatacattgcgtgcaatgtatcaacaacatccaatacgtgttgatattgccggtagtgtagaaagtatatacgatattacaaaagatgatttgtatctatgttatgaaacgttttatcatccatcaaatatggttttatttgttgttggtgatgtgaatccagaagaaatatgtcgaatagtaaaacaacacgaggatgctcgtaataaagttaaccaacccaaaatcgaacgaggacttgttgatgaaccggaggatgttaaagaagcatttgttactgaatctatgaaaattcaatcaccaagactaatgcttggttttaaaaataaaccattacaagaagcgcctcaaaaatatgtacaacgtgatttagaaatgtcattattctttgagttaatttttggggaagaaacagatttttatcagaatttattaaacgaaggacttatcgatgatacatttggttatcaatttgtactagagccgacgtatagtttttcaatcgtgacaagcgctactgaagaaccagataaattaaaaaaattattattagatgagttgcgtgataaaaaaggcaatttccaagatgcagaagcatttgaacttttgaaaaagcaatttataggtgagttcatatcaagtttaaactcacctgaatatattgctaatcaatatactaaattgtattttgaaggtgttagtgtgtttgacatgttagacattgttgaaaacatcacgttagatagtattaatgaaacgtcatcgttatatttaaatttagatcagcaagtcgatagtcgtttggagattaaaaagtaatgaaagcattagtattaggtggttctggttcaattggttctgagatagtcaaacaattattaactgatggatttgaagtttatgtgcaatattatcgtactgatataaatgaattaactagcaaatttaatgatgataaagttcgttttatacaagcggatttatctcaaacaattgatattgacaaaacatttggtgacattaaatcattagactgtttaatatatgcaagtggtcagtctttatatggtgttttacaagatatgaaagaccatgatattgatgcatgttatcagttaaatgtcttgcaattaattcgattatgtagatatttcgttgatgttttacgtcaaagtgacaatggaagaattattgtaatttcatcaatttggggtgagacaggagctagtatggaaactatttattcgacgatgaaaagtgcacaattaggtttcgttaaggcgcttagtcaagagcttgcactaacatcagtgacagtaaatgctatcgcacctggatttgtagccggtaatatggcaagtgagtggcaagaagatgaacttcaagcaatgataactgaattaccacaacagcgattgattttaccgagtgaggttgctcatacatgcgcctatttatatcacccaaatgctagaagtgttactggaactatacagaaagttaatggtgcttggtatatttaaaatatagaactatttttatgagcaaatgtttttatgattgatgttataatatgaatattacaatgaatcataatttgttaattaaacaaggggtgaggttcaccatgacagttgcagagaaaaaagaatggtacctagaatacgaaattgaaattaatagaccgggtcttttaggtgatgtatctagtttattaggtatgttaggtataagtattgttacaattaatggtgttgatcaaggtaaacgaggccttttaattaaaacagacaatcttgaaaaagttgaacgttttgagcaaatagctcgtggtataaatgaaattgaaataacaaagcttaaaaaaccagaattaagagaccgtcttgcagtaagacatggtagatatattgagcaagatgcaaaagataagaaaacctttcgatttgagcgtgaagatttaggcttgttagtagactttttagctgaattgttcaaagaagaaggtcataagttgattggcattagaggtatgccacgagttggtaaaactgaatcaattgttgcgggaagtgtttgtgcacataagagatggttatttattagttctactttaataaaacaaactgtacgtagctctctaattaaaggggaatatgatgccaatcatgtatacattattgatggtgcagttactgccagagaatctaatccaaaacatcaagagcttgttaacgaagttatgacgttaccatcaatcaaagtcgttgaacatccagatttatttgttgaaacaagtacttgtacaatggaagattttgactatattatcgaattgagagaaaatgaaaatcaagaaatacattacgaagaaatgaagaaacagacagtccaaagtaagaataatttagattttggagatccgtttggtggtggttttggtttcttcgagtaagtgtaaggaggctatgaattgaaaacggtcggtgaagcgctaaaaggtagacgtgaaaggttaggaatgactttaacagaattagagcaacgtactggaattaaacgtgaaatgctagtgcatattgaaaataatgaattcgatcaactaccgaataaaaattacagcgaaggatttattagaaaatatgcaagcgtagtaaatattgaacctaaccaattaattcaagctcatcaagatgaaattccatcgaaccaagccgaatgggacgaagtaattacagttttcaataataataaagacttagattataagagtaaatcaaaagagccaatacaattattagtaatcatgggtattacagttttaataactttattgttatggatcatgttagttttaatattttaacagaaataaattagtgagaaatgaggatgtataatgaatattccgaaccagattacggtttttagagtagtgttaataccagtttttatattgtttgcgttagttgattttggatttggcaatgtgtcatttctaggaggatatgaaataagaattgagttattaatcagtggttttatttttatattggcttcccttagcgattttgttgatggttatttagctagaaaatggaatttagttacaaatatggggaaatttttggatccattagcggataaattattagttgcaagtgctttaattgtacttgtgcaactaggactaacaaattctgtagtagcaatcattattattgccagagaatttgccgtaactggtttacgtttactacaaattgaacaaggattcgtaagtgcagctggtcaattaggtaaaattaaaacagcagttactatggtagcaattacttggttgttattaggtgatccattggcaacattgattggtttgtcattaggacaaattttattatacattggcgttatttttactatcttatctggtattgaatacttttataaaggtagagatgtttttaaacaaaaataaatatttgtttatactagatttcattttcatatggaatctagtttttttaatcccaattttagaaattagccacgcaattgtttataatgatatattgtaaaacaatattcgttcatttttttagggaaaatctgtagtagcatctgatacattgaatctaaaattgatgtgaatttttaaatgaaatacatgaaaaaatgaattaaacgatacaagggggatataaatgtcaattgccattattgctgtaggctcagaactattgctaggtcaaatcgctaataccaacggacaatttctatctaaagtatttaatgaaattggacaaaatgtattagaacataaagttattggagataataaaaaacgtttagaatcaagtgtacgtcatgcgctagaaaaatatgatactgttattttaacaggtggcttaggtcctacgaaagatgacttaacgaagcatacagtggcccagattgttggtaaagatttagttattgatgagccttctttaaaatatattgaaagctattttgaggaacaaggacaagaaatgacacctaataataaacaacaggctttagtaattgaaggttcaactgtattaacaaatcatcatggcatggctccaggaatgatggtgaattttgaaaacaaacaaattattttattaccaggtccaccgaaagaaatgcaaccaatggtgaaaaatgaattgttgtcacattttataaaccataatcgaattatacattctgaactattaagatttgcgggaataggtgaatctaaagtagaaacaatattaatagatcttatcgataaacagactaatcctacgattgcgcctttggcgggaagtcatgaagtatatattagattgactgcaaatgccgactcaaaagaacaagcacaatcattgattcaacctgttaaacaagaaattcttgatcgtattggagaatattattatggttcagatgacacattaattgagcaagctgtaataaagaaaattcatgaaccttttgtaatatatgatggtattactaatggtgctttatatcatcgattgaaagaagtggatttaaacgatgttctaaagggtatgattaatcacaatgaaaactttgttgatattaataaacctattgagcagcaattaaaagatgcagtgcaatttgttaataaattgtttaatgtgtcatcagcaattattctattagagtatgatggtgtagtccatataggctatgataataactttgaatttaaaactgagcaatttaaaatgtctaaatctagaaatttattaaagaacagaagtcaaaattatgcgctcataagattattaaattggcttagaacaacaaattaattgtattatcgataaaaatataagcacgtttgttcgtttttgcgttttgatttcaagattttatacgaacaaatattcgcaaaacacttgtattttattttgaatccttgtatagtattggtaagataattaaaagatagcaatttcaattaggaggtctcgctttggataacgatcgtcaaaaagctttagatacagtaattaaaaatatggagaaatctttcggtaaaggtgccgtaatgaagttgggtgacaatataggtcgccgagtttcaactacatcaactggttcagttacattagataatgcgctaggtgtaggtggctatcctaaaggacgaattattgaaatttatggtcctgaaagttctggtaagacaacagtagcgcttcacgctattgctgaagtacaaagtaatggcggggtggcagcatttatcgatgctgaacatgctttagatccagaatatgctcaagcattaggcgtagatatcgataatttatatttatcgcaaccggatcatggtgaacaaggtcttgaaatcgccgaagcatttgttagaagtggtgcagttgatattgtagttgtagactcagttgctgctttaacacctaaagctgaaattgaaggagaaatgggagacactcacgttggtttacaagctcgtttaatgtcacaagcgttacgtaaactttcaggtgctatttctaaatcaaatacaactgctattttcatcaaccaaattcgtgaaaaagttggtgttatgttcggtaatccagagactacaccaggtggacgtgcattaaaattctatagttcagtaagactagaagtacgtcgtgcagaacagcttaaacaaggacaagaaattgtaggtaatagaactaaaattaaagtcgttaaaaataaagtggcaccaccatttagagtagctgaagttgatattatgtatggacaaggtatttctaaagagggtgaacttattgatttaggtgttgaaaacgacatcgttgataaatcaggagcatggtattcttacaatggcgaacgaatgggtcaaggtaaggaaaatgttaaaatgtacttgaaagaaaatccacaaattaaagaagaaattgatcgtaaattgagagaaaaattaggtatatctgatggtgatgttgaagaaacagaagatgcaccaaagtcattatttgacgaagaatagtacacaaatttatatctatagttaaacttagcaaatatccttataggattgattgaaagtgatattcatctcataaagctagaataatatctaactttatgggatacactacaaatcgagactataaggttttttattttatttattattacattatcaatagttttataatcgagcttcaaaactttagaaaatagtagaaatagcattcaatatagtgcaaaagtgcaaattgataacttgacacttatctcctataaaccgtacaattaatttgtatgatttatatataatttcataaagtcatattgaatttcatataaagagcaaaccctagaaaaggaggtgtttgtgtgaatttattaagcctcctactcattttgctggggatcattctaggagttgttggagggtatgttgttgcccgaaatttgttgcttcaaaagcaatcacaagctagacaaactgccgaagatattgtaaatcaagcacataaagaagctgacaatatcaaaaaagagaaattacttgaggcaaaagaagaaaaccaaatcctaagagaacaaactgaagcagaactacgtgaaagacgtagtgaacttcaaagacaagaaacccgacttcttcaaaaagaagaaaacttagagcgtaaatctgatctattagataaaaaagatgagattttagagcaaaaagaatcaaaaattgaagaaaaacaacaacaagtagatgcaaaagagagtagtgttcaaacgttaataatgaagcatgaacaagaattagaacgcatctccggtctcactcaagaagaagctattaatgagcaacttcaaagagttgaggaagaactgtcacaagatattgcagtacttgttaaagaaaaagaaaaagaagctaaagaaaaagttgataaaacagcaaaagaattattagctacagcagtacaaagattagcagcagatcacacaagtgaatcaacggtatcagtagttaacttacctaatgatgagatgaaaggtcgaatcattggacgagaaggacgaaacatccgcacacttgaaactttaactggcattgatttaattattgatgacacaccagaagcggttatattatctggttttgatccaataagaagagaaattgctagaacagcacttgttaacttagtatctgatggacgtattcatccaggcagaattgaagatatggtcgaaaaagctagaaaagaagtagacgatattattagagaagcaggtgaacaagctacatttgaagtgaacgcacataatatgcatcctgacttagtaaaaattgtagggcgtttaaactatcgtacaagttacggtcaaaatgtacttaaacattcaattgaagttgcgcatcttgctagtatgttagctgctgagctaggcgaagatgagacattagcgaaacgagctggacttttacatgatgttggtaaagcaattgatcatgaagtagaaggtagtcatgttgaaatcggtgtagaattagcgaaaaaatatggtgaaaatgaaacagttattaatgcaatccattctcatcatggtgatgttgaacctacatctattatatctatccttgttgctgctgcagatgcattgtctgcggctcgtccaggtgcaagaaaagaaacattagagaattatattcgtcgattagaacgtttagaaacgttatcagaaagttatgatggtgtagaaaaagcatttgcgattcaggcaggtagagaaatccgagtgattgtatctcctgaagaaattgatgatttaaaatcttatcgattggctagagatattaaaaatcagattgaagatgaattacaatatcctggtcatatcaaggtgacagttgttcgagagactagagcagtagaatatgcgaaataatttttgtctccctcacaaattagtgagggagcttttttaagttgtagtcttaatctagttagacagcactttatcggtaataactatattaaacagtagttatttgaaagtaagacggaccttatattaaataagaagttattgcttttaataaaaatgttttaggcttcgtaattactatatttatattatgtaaacctataaagatgattgcttttctatccaataaaaaagaagagaagatgtaacacatcttctcttctgcaatattaattaggatttatttctaagttgagttattttaattgtaaatctgttttctttaattcttttataacttctgcagtatcataacaatttgttgcaatcgttgaatatctctctgctaaacgatatgcattaatgtaaagctttaaactttctttagctatatcctctgcatcttcgaattttgatgggttagacataaccactaattctgcaaatttttctggatcaatattaatagacatgtatttatttacaactcctatttattttgatgtcttaatactaacatattgaagttttcagacaaagtaatgtctctctataattgaagaaaaataattcaaagaatttaatatttactttaaatattagaacgtatgaattaaactagtatttatgagaggatgaacaaaacatgagaataatgtttataggggatatcgtaggtaaaattggacgagacgcaattgaaacgtacatacctcaactgaagcaaaagtataaaccaacagttacaattgtaaatgctgaaaatgcagcacatggtaaaggtttgactgaaaaaatatataaacaattactaagaaatggtgtagatttcatgactatgggtaatcacacatatggtcaacgtgaaatttatgattttatagatgaagcaaaacgactagtaagaccagcgaattttccggatgaagcgccgggaattggtatgagatttatacaaattaatgatattaaacttgcagttattaatctgcaaggaagagcgtttatgccagatattgatgatccttttaaaaaggcagatcaattagtcaaggaagcacaagaacaaactccgtttatatttgttgattttcatgcagaaacaacttctgaaaagtatgcaatgggatggcatttagatggtagagctagcgctgttgttggaacgcatacacacattcaaacagcagatgaacgtattttaccaaaggggacagggtatataacggatgttggtatgacaggtttttatgatggcattttaggaataaataaaacagaggtaattgagcgttttatcactagtttgccacaaagacatgttgttccaaatgaaggtagaagtgtattatctggtgttgttattgatttagacaaagaaggtaaaacaaagcacatcgaacgtatattgataaatgatgaccatccattttcaacattttaaaattacgtaagtaaacattcgaattggaccctatcgtccattagtatgaatttaatatagtaccactgtttacatagtaaatcggtggttctttttgttatcatttaatatgaaatatatccataggaggcatataactatgaaaccacaattatcgtggaaagttggcggtcaacaaggcgaaggtattgaatcaactggggaaatcttcgctacggctatgaatagaaaaggatattatttatatggatatagacatttttcaagtcgtatcaaaggtggacatacgaataataaaattagagtttctacgacgcctgttcatgcaattagtgatgatttagatattttgattgcatttgaccaagaaacaattgatgttaaccatcatgaaatgagagaagacagtattattttagctgatgccaaggctaaacctgtgaaaccagaaggatgtcatgcacagcttattgaattaccttttacagcaaccgctaaagaattaggtacagcattaatgaaaaacatggttgcaataggtgctactagcgcattgatgaatttgaatacaaatacatttgaagaacttattactaatatgttttctaaaaaaggtgacaaggtagttgaagtcaatatccaaacattaaacgaaggttatcaattaatgcaatcccgcttacctgaaatcgacggggactttgaattagagtcaacagatgcactaccacatctatatatgattggtaacgatgccattggattaggtgcaattgctgcaggttcacaatttatggcggcatatcctattacacctgcgtctgaagttatggaatatatgattgccaatatatctaaagtaaacggagcggttattcaaacagaagatgaaattgctgctgtaactatggctattggtgcaaattatggtggagtcagagcgtttacggctagtgctggtccaggtttatctttaatgatggaagcaattggattatctggtatgactgaaacgccattagtcattattaatactcaacgaggtggaccttctactggattacctacgaaacaagaacagtcagatttaatgcaaatgatttatggtacacatggtgatattccaaaaatagttgtagcaccaactgatgcagaagatgcattttatttaactatggaagcctttaatttagcagaacaatatcaatgccctgttatagttttaagtgatttgcaattatctttaggtaaacaaactgttgaaaaattagattataatcgcattgaaattaaacgtggtgaaatcattcaatctgatattgaacgtgaagaagatgataaaggttatttcaagcgttatgcgttaacatccaatggtgtttctcctagacctatccccggtgttaaaggaggtattcatcatataactggtgtggaacacaatgaagaaggtaaacctagtgaatctgcgtcaaatagacaacaacaaatggaaaaacgaatgcgtaaaattgagcagttactaattgaatcgccagtagaagctaacttacaacatgaggatgcagatattctttatatcggttttatttctacaaaaggtgcaattcaagaaggtagtaaccgtttgaatcaacaaggtataaaagttaacactgtacaaattagacaattgcatccattcccaacaagcgttattcaagatgcagttaataaagcgaagaaagtcgttgtagtggagcacaattatcaaggacaattggctagtattataaaaatgaatgtcaatattcatgataagattgaaaattatacaaagtatgatgggacacctttcctaccacatgaaattgaagaaaaaggcaaaataattgctactgaaataaaggagatggtatagatggcgacatttaaagattttagaaataatgttaagcctaactggtgccctggatgtggcgatttctcagtacaagctgcaattcaaaaagcagccgcaaatatagggttagaacctgaagaagtagctatcatcaccggtataggatgttctggccgtctttcaggatatattaattcttatggcgttcattctattcacggacgtgcattacctttagctcaaggtgtaaaaatggcgaataaagatttaactgttattgcatctggaggagatggtgatggttatgctataggtatggggcatacaatccatgctttaagaagaaatatgaacatgacgtatatagtcatggataatcaaatttatggtttgacaaagggacaaacatcgccgtcatcagcagtaggatttgttactaaaacaacgccaaaaggtaatatagaaaaaaatgttgcgcctttagaattagcattatcatctggtgccacatttgtagcccaaggtttttcaagcgatattaaaggattaacaaaactaattgaagatgcaattaatcatgatggattttcattcgttaatgtcttttcaccatgtgtgacttataataaaattaacacatacgattggtttaaagaacatttaacaagtgttgatgacattgaaaattatgattctacagataaacaattagcgactaaaactgttattgaacatgaatctttagtaactggtattgtttatcaagataaagaaacaccatcatatgaatctcaaattaaagagttagatgatacaccacttgctaaaagagatatcaaaattactgaagacaccttcaatgcattaactgaacaatttatttaataattaaaactgagtcgtataaatgtatttataacagatccatttatgctactcagttttttactattacaaaaaataaaggagtttttaaaaatgaaagacacattaatgagtatacaaataattcctaaaacaccaaacaatgacaatgttataccttacgtagacgaggcgattaaaataattgacgaatctggtttgcattttagagtaggtccgttagaaacgacagtacaaggaaatatgaatgaatgtttaattttaatacaatcattaaatgaacgaatggtggaacttgaatgtccaagtattattagccaagttaagttttatcatgtgccagatggcatcactattgaaactttaactgaaaaatatgatgaataacattaaaagtgaagtaaactggatttgaattggcttgttagagatgacgtataactttaactgtttttgcactttatagttaaatttaatataattattaaatgatacgggcaaatagaaaggattttgtaaagtgaacgaagaacaaagaaaagcaagttctgtagatgttttagctgagagagataagaaagcagaaaaagattatagtaaatattttgaacatgtttatcagccgcctaatttaaaagaagcgaaaaaaagaggtaaacaagaagttcgttataatagagatttccaaattgatgaaaaatatcgcggtatggggaacgagcgtacatttttaattaaaacatatggatgtcaaatgaatgcacatgacactgaggtcattgctggtatacttgaagcattaggctatcaagcaacgactgatattaacactgcagatgttattttaattaatacatgtgcgattagagaaaatgccgagaacaaagtgtttagtgaaataggtaatttgaagcatttgaaaaaagaacgacctgatattttaatcggtgtttgtggttgtatgtcacaagaagagtcagtagtgaataaaattttaaaatcgtatcaaaatgtagatatgatatttggtacacataatattcatcatttaccagaaattttagaagaagcatacttatctaaagcaatggttgttgaagtatggtctaaagaaggagacgttattgaaaatcttccaaaagtccgtgaaggcaacattaaagcatgggtcaatattatgtatggttgtgataagttttgtacatattgtattgttccatttacaagaggtaaagaacgaagccgtagacctgaagacattatagatgaagtacgtgaacttgctcgtgaaggttacaaagaaataacgcttttaggtcaaaatgtaaattcttatggtaaagatttacaggatatagaatatgacttaggagatcttttacaagcaatttctaaaatagcgattccaagagttcgtttcacaacaagtcatccttgggactttacagatcacatgattgatgttatttcagagggtggtaatatcgttccgcatatccacttgccagttcaatctggaaataatgcagtattaaaaataatgggtagaaaatatacacgagaaagttatttggatttagtaaaacgaatcaaagatagaattcctaatgtagcattaactacagatattattgtagggtatccaaatgaatcagaggaacaatttgaagaaactttaactctgtatgatgaagttggttttgaacatgcatatacgtatttgtattcacaacgtgatggtacgcctgctgctaaaatgaaagataatgtacctttaaatgtcaaaaaggaacgattgcaacgtttgaataaaaaagttggtcattattcacaaatagctatgagtaagtacgaaggacaaactgtaacagtactttgtgaaggtagtagtaaaaaagatgatcaggttcttgctggctacactgataaaaataagctagttaatttcaaagcgcctaaagaaatgattggtaaactagtggaagtacgaatagatgaagctaaacagtattcattaaatggcagttttgtaaaggaagtagagccggaaatggtgattcaataaatgtataataaagatgacgtgttgaaacaagcggataatattgcaaataaaattaaaaatttggatactatcaaaacatatcaacaaattgaagcacagattcatcagaaccaaacgataaagactaaaatggatatgttaaaaaagcatcaaaaacaagcagtaaactttcaaaattacgggaaacaaaatgcgctagaacagtcggaacataccattcaaagtatagaagcagaaataaatacattgcccatagttgaacagtttcaaacttcacaatatgaagcgaatcaattattgaaaatgtttgtatcaacaatggaaacacgtttaaatgaccataataaagccaagcatagtgattaattacaaacaaaaaggagaacaatcatatgaaatcaagaaaactggctataactgcacttttaattgcaataaatgttgtattaagcagtattatcatcattcctctaggaccagttaaggcagcaccagtacagcattttgtaaatgtattaagtgcggtcatagtaggtccttggtatggattagctcaagcgcttatatcatcaattttaagagttctttttggtactggtacagcttttgcatttccgggtagtatgattggagttttattggctagtatgttttacatatatcgtaaacatatattcatggccgcggtcggtgaagtacttggaactggtgtcatcggaagtttaatttgtataccattagcatatttcctcgggcttcaagacttcttcattaaaccgttaatgattacgttcatagtctcaagtgctatcggatctattataagttatttcttattaattactctaaaaaaacgtggtattcttcaaaggtttataaaataattttatgatatatgatttcaaacagagtcattgttcattttaatattgaacgcccttacttaattaaatgtcttgaatgttagaattttaatataattctaaacatgctattgacacattttattaggtttgaggcgttttcttatacatttaagatgcttcgtgattatatggtatgaataggtttgtaaaagtaagtatgttaaaatgtataagttaaataattaataattagaaagcttacaaacgaatatattgtaaagacaaattttaaaaagagacaagggttgtgaagaaataatatgtctaatgttacaccaatgatgcagcaatatttaaaaataaaatcagaataccaagattgcttattattttttagactaggtgatttctatgaaatgttttatgaagatgccaaggaggcatcacgtgtacttgaaattactttaactaaaagagatgctaaaaaagaaaatccaattccgatgtgtggtgttccgtatcattctgcagatagttatatagatacacttgttaataatggatataaagtagctatttgtgaacagatggaagatccgaaacaaacgaaaggtatggttagacgtgaggtattaagaattgtgactccaggaactgtgatggagcaaggtggtgtagatgataaacaaaataactatattttaagttttgttatgaatcaacctgaaattgcgcttagttactgtgatgtttctactggcgaattaaaggttacacattttaatgatgaagcgactttattaaatgaaattacgacgataaaccctaacgaagttgttatcaatgacaatatttccgataatttaaaaagacaaattaatatggtgacagaaacaataacagtcagggaaacgttatcatcagaaatctatagtgtgaatcaaactgaacataaattaatgtatcaagcgacacaattattgctagattatattcatcatacacaaaaacgtgatttatcgcatatcgaggatgttgttcaatatgcagctatagattatatgaaaatggatttttatgctaagagaaaccttgagttaacggaaagcattcgattaaaatcaaaaaaaggaacgctactttggctaatggacgaaacgaaaacaccaatgggagcacgccgcttaaaacaatggatagatagaccactaataagtaaagaacaaattgaagcacgattagatatcgttgatgaatttagtgctcatttcatagaaagagacaccttaagaacatatcttaatcaagtgtatgatattgaacgtcttgttgggcgtgttagttacggaaatgttaatgcgagagatttaattcaacttaaacattccatttctgaaataccgaatattaaagcattactaaattctatgaatcagaatactcttgtacaagttaatcaactagaaccccttgatgatttacttgatatattagaacagagtttagtagaagaaccaccaatttcagttaaagatggcggactattcaaagttggttttaatacgcaattagatgaatatcttgaagcttcaaaaaacggaaaaacatggttagcagaattacaagccaaagaaagacaacgtacaggaataaaatcattgaaaataagctttaataaagtgtttggttattttatagaaataacacgtgccaacttgcaaaattttgaaccaagtgaatttggttatatgaggaagcaaacgttatcgaatgctgaacgttttataactgatgaacttaaagaaaaagaagatatcattttaggtgcggaagacaaagccatcgaattagaatatcaattatttgttcagctacgtgaagaagttaaaaaatatactgaacgtttacaacaacaagctaaaattatttcagagctagattgtttacagagctttgcagaaattgctcaaaaatataattacactaggccttcatttagtgaaaataaaacattagaattagtggaatctaggcacccagtagtggaaagagtaatggattataatgactatgtgcctaataattgtcgattagataatgaaacatttatatatttaattacaggtccgaatatgtctggtaaatcgacatatatgagacaagttgccataattagtataatggcccaaatgggagcttatgtcccttgtaaagaggcagtgttacctatatttgatcaaatattcactagaataggtgcggcagatgatttggtttcaggtaagagtacgtttatggtagaaatgctagaagcacaaaaggcattaacttatgcaacagaggatagtttgattattttcgatgaaattggacgtggtacttcaacgtatgacggtttagctttagcgcaggcaatgatagagtatgtagctgaaacatcacatgctaaaacgttattttcaacacattatcatgaattgacaacattagatcaagcattaccaagtctaaaaaatgttcacgtcgctgctaatgaatataaaggtgaacttatattcttgcataaagtcaaagatggtgcagttgacgatagttatggtattcaagttgcgaaattagctgatttacctgaaaaagttattagcagagcacaagtgattctaagcgagtttgaagcgtctgctggtaaaaaatcatcgatatcaaatttaaaaatggtcgaaaatgaacctgaaattaatcaagaaaatttaaacttaagtgttgaagaaacaactgatactttatctcaaaaagactttgaacaagcatcatttgatttgtttgaaaatgatcaagaaagcgagattgaactacaaattaaaaatttgaatttatctaatatgacaccaattgaggcattggtgaagttaagtgaattacaaaatcaattaaaatagaggtgttgcaaaatggggaaaattaaagaactccaaacctcattagcaaataaaatcgcagcaggtgaagtagttgaaagaccgagttctgttgtgaaagaactgttggaaaatgctatagatgcaggcgctacagaaataagcattgaagtagaggaatctggcgtccaatctattcgcgtagtcgataatggaagcggaattgaagcggaagacttaggattagtatttcatagacatgcgactagtaaattagatcaagatgaagatttatttcatattaggacattaggattccgtggtgaagcactagccagtatttcatcagttgctaaagtaacattgaagacttgcacggataatgctaatggaaatgaaatatatgtagaaaatggtgaaatattaaatcataagcctgcaaaagcgaaaaaaggaacagatatacttgtagaatcattattttataatacaccagcacgtttaaaatatattaaaagtttatacactgaactaggtaaaataacagatattgtcaacagaatggcaatgagccatccggacattcgaatagcactcatttcagatggcaaaacaatgttaagtacaaatggttcaggacgaactaatgaagtgatggcagagatttatgggatgaaagttgcacgagatttagtacatatatctggagatacaagtgattatcacattgaaggttttgttgcaaagcctgaacattctagaagtaataagcactatatttctatttttattaatggacgatacattaaaaactttatgctaaataaagcgattttagaaggctatcatacactcttaacaataggtaggttcccgatttgttatattaatattgaaatggatccaatcttagtagacgtaaatgttcatccaacaaaactagaagtgcgtttatcaaaagaagagcaactatatcaattgatagtgagcaaaatacaagaagcatttaaagaccgtatattaattcctaaaaataacttggattatgtgccgaaaaaaaataaagtgttacattcattcgaacaacaaaaaatcgaatttgaacaaagacaaaacacagagaataatcaagagaagacgttttcatctgaagaaagtaacagtaagccatttatggtagaaaatcaaaacgatgaaatagttataagagaagattcatataatccattcgtaacgaaaacgtctgaaagtttaatagctgatgatgaatcttccggttataataatacacgtgaaaaagatgaagactacttcaaaaagcaacaagaaattctacaagaaatggatcaaacatttgattcgaatgacgatacatctgtgcaaaattatgagaataaagcgtctgatgattattatgatgtaaacgatattaaaggaacaaaaagtaaagaccctaaacgaagaattccatatatggaaattgttggccaagtacatggaacgtatattattgctcaaaatgaatttggcatgtacatgattgaccagcatgcagctcaagaaagaataaaatatgaatattttcgagataaaataggtgaagttaccaatgaagtacaagatttattaatcccgttaacatttcatttttcaaaagatgaacaattagtcattgatcaatataaaaatgagcttcaacaagtaggtatcatgttagaacattttggtggtcatgattatattgtaagtagctatccagtttggttccctaaagatgaagtagaagaaattattaaagatatgattgagctaattttggaagagaaaaaagtagatatcaaaaaattacgtgaagatgtagcaatcatgatgtcatgtaaaaaatctattaaagcgaatcattatttacaaaaacatgaaatgtctgatttaattgatcaattaagagaagcggaagatccatttacatgtccacatggtcgtccaattatcattaatttttcaaaatacgaattagaaaaattatttaagcgtgtgatgtagagaggatgaatcaagtgaataacaacatattgcctgccataagaaacattaaagatttagagaaactgattaaaacagattataaaatgtgtgtgcttctagatatgcatataggacatataaaaagtattatggaattgctgaagcaaaatcatatagagtgttttattcatatagatttgataaaaggtttaagccacgatgaatttgcaagtgaatttattattcagcaatacaagccaaaaggtatcgtatcgactaaatctaaagtaataaaaaaagctaaatcattaaatactttaacgatttttagagtatttattattgatagtcaagcattgaaacgcagtatagatttgataaaaaaagttgaacctgattttgttgaagtacttccaggtgttgcgagtaaagcgattcatcatattcagaaagaaacaaacacacaagtcattgcaggtggcctaattaatacaatagatgaagtcaatgaagctgttaaaaatggagcgaaatatgtaacaactagttatgataaactttggtaaatcataagtctgcaaaaatttcatttttcacgagatttagtcatataacatattaaaaaagccgttttcatatgggatatgcagtaggtatcatacaaagaataattaaataacataattagcacctctaaaacgattaaaatcattaaagttttagaggtgtttattagtaaaaaatgcaactagtcataaaaaatatggctgaagaatgtcaattaaacataatggcgtcataaataaattagtgcggattgatatttctagttttcaaattaaactacttttataaagacttgaaaaattaaatttgacaaaatttttacaaaaaccattgacaacgctttcatatcgatagtatcataacaaatataataaaagttaatacatagaatagagacgggagatttctacgagccaaactgctggtgtaggaatctctttgtctttttgggaggacatttaatatgaatgtatatttagcagaattcctaggaactgcaatcttaatcctttttggtggtggcgtttgtgccaatgtcaatttaaagagaagtgctgcgaatggtgctgattggattgtcatcacagctggatggggattagcggttacaatgggtgtgtttgctgtcggtcaattctcaggtgcacatttaaacccagcggtgtctttagctcttgcattagacggaagttttgattggtcattagttcctggttatattgttgctcaaatgttaggtgcaattgtcggagcaacaattgtatggttaatgtacttgccacattggaaagcgacagaagaagctggcgcgaaattaggtgttttctctacagcaccggctattaagaattactttgccaactttttaagtgagattatcggaacaatggcattaactttaggtattttatttatcggtgtaaacaaaattgccgatggtttaaatcctttaattgtcggagcattaattgttgcaatcggattaagtttaggcggtgctactggttatgcaatcaacccagcacgtgatttaggtccgagaattgcacatgcgattttaccaatagctggtaaaggtggttcaaattggtcatatgcaatcgttcctatcttaggaccaattgccggtggtttattaggtgcagtggtatacgctgtattttataaacatacatttaatattggttgtgcaattgcaattgttgtagttattattactttgattttaggttacattttaaataaatcatcaaaaaaaggtgatatcgaatcaatttactaaaataaaaagaaacgtaaatagcataatttaacatgtttgattcatggattatgctattttttcgccaaaatttaacagattttgtacaatgggttagcgattattttttaataaaggagatactactaatggaaaaatatattttatctatagaccaaggaacaacaagctcaagagcgattttattcaatcaaaaaggggaaattgcaggggtagcacaacgtgagtttaagcaatattttccacaatcaggttgggttgaacatgatgcaaatgaaatttggacatctgtgttagctgtaatgacggaagtaattaatgaaaatgatgttagagctgatcaaattgcaggtatcggtattacaaaccaacgcgaaacaacggtggtttgggacaaacatactggccgcccaatttatcacgcaattgtttggcaatcacgtcaaacacaatcaatttgttcagaattaaaacaacaaggatatgaacaaacatttagagataagacaggattacttttagatccgtattttgcaggtacaaaagttaaatggattctagacaatgttgaaggtgcacgagaaaaagcagaaaatggcgatctattatttggaacgattgatacttggttagtatggaaattatcaggaaaagctgcgcatattactgattattcaaatgcgagtcgtacattaatgtttaatatccatgatttagaatgggacgatgagttattagaactacttacagtacctaaaaatatgttgccagaagttaaaccttcaagtgaagtatatggtaagacaattgattaccacttctatggtcaagaagtaccaatcgctggtgtagctggtgatcaacaagcagcattatttggacaagcttgcttcgaacgtggtgacgtgaaaaacacatatggaactggtggcttcatgttaatgaatacaggtgacaaagcggttaaatctgaaagtggtttattaacaacaattgcttatggtattgatggaaaagtaaattatgcgcttgaaggttccatctttgtttcgggttcagcaatccaatggttacgtgatggattaagaatgattaattcagcaccacaatcagaaagttatgcgacacgagttgactctactgagggtgtttatgttgttccagcttttgtaggtttaggaacaccatattgggattctgaagcacgtggtgcgattttcggtttatcacgtggaactgaaaaagagcactttatccgtgcaactttagaatcactatgttaccaaactcgtgacgttatggaagcaatgtcaaaagactctggtattgatgtccaaagtttacgtgtcgatggtggtgcagttaaaaacaactttattatgcagttccaagcagacattgttaatacttctgttgaaagacctgaaattcaagaaactacagctttaggtgctgcatttttagcaggattagcagttggattctgggagagtaaagatgatatcgctaaaaactggaaattagaagaaaaattcgatccgaaaatggatgaaggcgaaagagaaaaattatatagaggttggaaaaaagctgttgaagcaacacaagtttttaaaacagaataaacttgtagattagacttttgtataaacattgtgatacaatcaatttaagttaatatttgaatcgagaagcgagagatttgttcgaacatgtacaattgaaggattgtttatgtgggacaagtctctcgtttttacattttttaggaggcgttttggaatggcattgtctacttttaagagagaacatattaaaaagaatttaagaaatgatgaatatgatttagtaattattggtggcggtattacaggtgcaggtattgcactagacgcgagtgaaagaggaatgaaagttgcattagttgaaatgcaagactttgcacaaggaacaagctcaagatctacaaaattagtccatggtggtttacgttacttaaaacaattccaaattggagtagttgccgaaactggtaaagaacgtgcgattgtttatgaaaatggacctcatgttacgactccagagtggatgcttttaccaatgcataaaggtggaacatttggtaaattctcaacatcaattggtttaggaatgtatgatcgtttagcaggtgttaagaagtctgaacgtaaaaaaatgttatctaaaaaagaaactttagctaaagaaccattagttaaaaaagaaggtctaaaaggcggcggttactatgttgaatatcgtactgacgatgcgcgtttaactattgaagttatgaagcgtgctgctgaaaaaggcgcagaaattatcaactatactaaatctgaacacttcacttatgataaaaatcaacaagtaaatggtgttaaagttatagataaattaactaatgaaaattatacaattaaggctaaaaaagtggttaatgcagcaggtccatgggttgatgatgttagaagtggtgattatgcacgcaataataaaaaattacgtttaactaaaggtgtacatgttgttattgatcaatcaaaattcccattaggtcaagcagtatactttgatactgaaaaagatggaagaatgatttttgcaattccacgtgaaggaaaagcgtatgtaggtactacagatacattctatgacaatatcaaatcttcaccattaactacacaagaagacagagactatttaatcgatgcgattaattacatgttccctagtgttaatgttacagatgaagatattgaatcaacatgggcaggaattagaccattaatttacgaagaaggcaaagacccttctgaaatctctcgtaaggatgaaatttgggaaggtaaatcaggtttattaactattgcaggtggtaaattaacaggctatcgtcacatggctcaagacattgttgatttagtatctaaacgcttgaaaaaagactacggtttaacatttagtccatgtaatacaaaaggtctggcaatttcaggtggcgatgtaggtggtagcaagaactttgatgcgtttgtagagcaaaaagtagatgtagctaaaggattcggcattgatgaagatgttgcaagacgtttagcatctaaatatggttcaaatgttgatgaattgttcaacattgcgcaaacatctcaataccatgatagcaagttaccattagaaatttatgtagaacttgtttatagtattcaacaagaaatggtatacaaacctaacgatttcttagttcgtcgttctggtaaaatgtatttcaatattaaagatgtattagattataaagatgctgtcatcgatattatggcagatatgcttgattactctccagctcaaattgaagcatatactgaagaagttgagcaagcaattaaagaagcgcaacatggaaataatcaaccagcagttaaagaataattaatttgtacaatcataaactggtgtcctgttttaagggcatcagtttttttatacgagatacattagtcaattgaaactatgcatcactaaatgtatgataataataaaagcgaatataaaagcgttgttattaaaggtgtgagatgatgactgaaaaacaatttaaattaactgtacaagataatacgaatattgaagttaaagtgaattttacagatgtagattcaaaaggaattattcatatatttcatggtatggctgaacatatggaacgttacgataaattagcacatgcactttcaaagcatggcttcgatgtgatacgtcataatcatcgaggacatggtattaatattgatgaatcaacaagagggcattacgatgatatgaaacgagttatcggtgatgcctttgaagtagcgcaaacagtgagaggcaatgttgataaaccatacattataatcggacattcaatgggatccgttatagctagattgtttgtagaaacatatccgcaatatgttgatggtctaattttaagtggtactggtatgtattcattatggaaaggtttaccaaccgttaaagtgttacaactgattacaaaaatttatggtgctgagaaacgagttgaatgggttaaccagttagtatcaaatagttttaataaaaaaatacgtccattacgtacacaaagtgattggatttctagtaatccaattgaagtagataactttattaaagatccatatagtggatttaatgtgtcaaatcaattattatatcaaacagcctattatatgctacatacatcacaattaaaaaatatgaaaatgttaaatcatgccatgcctatattattagtttcaggatatgacgatcctttaggtgattatggtaaagggattttaaaattggcgaatatatatagaaaagctggcattaaaaatgttaaagtgaatctttatcatcataaacgtcatgaagtgttatttgaaaaagatcatgacaaaatttgggaagacttgtttaaatggttgaatcaattttataaaaaataaagaaagtggaattaaatatgaataaaaataagccttttattgtagtaattgtggggccaactgcttcaggtaaaacagagcttagcatagaactcgcgaagcgtatcaatggtgaaatcataagcggtgattctatgcaagtttacaaacatatgaatattggaactgcaaaagtaacacctgaagaaatggatggtattccacatcatttaattgatatcttgaatcctgatgatacattttcagcatatgaattcaagcgattagcagaagatttaattactgatataacgaatagaggtaaagttccaatcatagcaggtggaacaggcttatatattcaatcattaatatataattatgaattagaagatgaaacagttacacctgcacaattatccatagttaaacaaaagttatctgcattagaacatttagataatcagcaactacacgattatttagctcaatttgatgcggtttctgcagaaaatattcaccctaacaaccgccaaagagtgttgcgcgctattgaatattatttaaaaacaaaaaaacttttgagtaatcgcaagaaagtgcaacaatttactgaaaattatgatacattattattagggattgaaatgtcgcgtaaaacattatattcaagaataaataaacgtgttgatattatgttggatcacggattatttagagaagtgcaacaacttgttgaacaaggctatgaatcttgccaaagtatgcaagctattggatataaagaattaatacctgtgattaacggacaaatgatttatgaagatgctgtcaatgatttaaagcaacattcacgccaatatgcaaaacgacaaatgacatggttcaagaataaaatgagtgttcattggttagataaagaaaatatgtcacttcaaatgatgttagatgagattacaacccagattaagtaaaaggagtccgacagatgattgcaaacgaaaacatccaagacaaagcactagagaattttaaagcaaaccaaactgaagtaactgtattctttctaaacggtttccaaatgaaaggtgttattgaagaatacgacaagtatgtcgtaagcttaaattctcaaggcaaacaacacttgatttacaaacatgcgatcagcacttatacagtagaaactgaaggtcaagcatctactgaaagtgaagaataagttgtaatcatatgggcacgatttaatgactcgtgtacataacgtttgaagtatgataaatagatatagaaataaagtcatatgtgacatcaattaaatgatgttcaaatgacaagatacaatagaggaatgtttgtaataaaaacgcttcatataaaggtcgagtcaatatatgatacgactttatatgaagcgttttatttgctatgagctagtctattttataataatttttctatttctctttcgatttgaacaggttttttttgaggtgcaaatcgtttaacaacgttaccttcgcgatccactaaaaacttagtgaaattccatttgattttctcattaaagaatccgtgttgtgccgcagtcaaatatctaaataaaggtaattgatgttccccttttacgtctattttttgatgcatagggaaggtaacaccatagtttaatttacagttttgagctgcttcttcgcctgatccaggttcttgaccaccaaattgattacaagggaaacctagaattacaaacccttgatctttgtatttctcgtataatgattgcaaaccttcaaattgtgaagtaaagccacattcgctagctgtattaacaattagcataacgtcacccttatatgcatctaatttgtaagtaacacctttatttgtttctactacaaaatcataaattgtctccattgtatcatcctttcgatttacttaaaatgtaccacaaaatcgtgtaatagtctttactaaaactctatgatagaatactttgagtaggattttattaaggagatgtataacatggctcagcaacaaattcatgatactaaaaataaactagaaaaagctgtcttagtcggtgtacatgctcaagatgataagcaatttaattttgagtctacaatggaggaattatcatctttatcagagacttgccaacttgaagtgttgggtcaaattactcaaaacagagatcgtgtagatcgcaaatattatgttggtaaaggtaaaattgaagaaattcaagcatttattgagttcaaagatattgatgtagtcatcacaaatgatgaattaacgactgcacaatccaaatcactaaatgaagctttaggtgtaaaaattattgatagaactcagttgattcttgaaatatttgcattaagagcaagaagtaaagaaggtaaattgcaagtagagctagcacaacttgattatttattacctagattgcaaggccatggtaaaagcctttctcgtttaggtggcggtattggaactagaggccctggtgaaacgaagttagagatggatcgcagacatattcgaactcgtatgaatgaaattaaacatcaattgcggacggtagaagaacatcgcgaaagatatcgaaataaaagaaatcaaaatcaggtgtttcaagtagctttagttggttatacaaatgctggtaaatcatcatggtttaatgttttagcaaatgaagagacgtatgaaaaagatcaattatttgcaacgttagatcctaaaacacgacaaattcaaataaatgatggatttaatttaattatttcagatactgttggttttatacagaaactacctacgacgttaattgcagcttttaaatcaactttagaagaggctaaaggtgcagatttattagtacatgtcgtagatagtagccatcctgaataccgtacgcagtatgacacagttaatgatttaatcaaacaattagatatgagtcatatttctcaaatagttatttttaataaaaaggacttatgtgatcatgcatcaaatcgtccagcaagtgatttgcctaatgtttttgtttcttctaaaaatgatggtgataaattacttgttaagacgttatttattgatgaaatcaaaaggcaattaacttattatgatgagacaattgcgacgaataatgcagatcgattatattttctaaaacaacatacattagtgactgaacttaaatatgatgaaattgaaaatgtttatcgtataaaaggatttaaaaaataataaaaggacgaaattcaaatgaaagatataagtaagatagtagctgacgtcgaatcaacgttagcaccatattttaaagaaattgaagaaacagcatatattaatcaagaaaaagtattaaatgcatttcatcatgtcaaagcaaccgaaagtgatctacaaggatcaacaggatacgggtatgatgactttggacgtgatcatttagaagaaatatatgcgcaggcatttaaagcagaagatgcaattgttcgtccgcaaattatttcaggtacgcatgcgattactattgcattacaaagtttattaaaacatggtgatgaattaatttatataacgggtagtccatatgacactttacttgaagtcattggcgtaaacggaaatggtattgaaagtttaatggagcacggcgtatcgtataaagatattgcacttaaagaaggtaagatcgatattgaaagtgtgttagatggggtttctgagcgcaccaaagtaatagcgattcaacgttcgaaaggctatgatcaaagaccttcaattccgctagatgaaattgaaaaggtaattactaggttgaaaaacgtgcatcctaatattttaatatttgtggataactgttatggggaatttgttgaaagacgtgaacctatagaatgtggtgccgatttaatagcaggatcattaattaaaaaccctggcggtggtttagctaagattggtggatacattgctggtagaaaagatttaattgaacgatgtggttatagattgacagcacctggtattggtaaagaagcgggtgcatcattaaatgcattgcttgaaatgtatcaaggtttctttttagcaccacacgttgtcagtcagagtcttaaaggtgcattgtttactagtttatttttagaaaaaatgaatatgaacacaacgccgaagtactacgaaaaacgaactgatttaattcaaacagttaaatttgaaacgaaagaacaaatgatttcattttgtcaaagtattcaacacgcatccccaattaatgcacattttagtccagaacctagttatatgcctggttacgaagatgatgttattatggcagctggtacgtttattcaaggttcatcgattgaattatctgcagatggacctattcgtcctccttatgaagcatatgttcaaggaggattaacatatgaacacgttaaaattgctgtgacaagagctgttaatcagttgaaagaacaaggacttatataatagattaaatttcaccctaaatgataatgtgttttgggtgaaattttttgcggagatttatcagattatttttaaaaattgaaaaaatattttagctgtagattgttttatgtcgttttagaagtcgaaatcgcagttatatcaatgttttaagctttatgttagaaaacctgacatatttttgaaatcctaaaaaaattatgataagttattaacaagttcaaaagtagaggagaggaacaatgatatcgaatgatgcaatcagacgaaatatggctgtcttctctatgagtgtagtaagtaagttaacggatttaacgccaaggcaaatacgttactatgaaacacatgaactcatcaaacctgaaagaacagaaggtcaaaaacgtctgttctcactcaatgatttggaaagattactagaaattaaatcattattagaaaaaggatttaatatcaaagggattaaacaaatcatttatgactcacaagagcatttaacaacagatgaacaagagataagaaaaaagatgattgtagatgccacgcaaaagcctattggagaaactttgccaataaatcgtggtgatttatcccgatttattaaataaaatttggaggattttaaaatgccaaaacgtactttcactaaagacgacattcgtaaatttgcagaagaggaaaatgtaagatatttaagattacaattcactgatattttaggaacaattaaaaatgttgaagtgcctgtaagccaattagaaaaagtacttgataacgaaatgatgtttgacggttcttctatcgaaggtttcgtacgtatcgaagaatcagatatgtacttacatccagatttagatacttgggtaatcttcccatggactgctggacaaggtaaagttgcacgtttaatttgtgatgtatataaaacagatggaacaccatttgaaggggatcctcgtgcaaacttaaaacgtgtattaaaagaaatggaagatttaggcttcacagactttaacctagggcctgaaccagaattcttcttgtttaagttggatgaaaaaggggaaccaactttagaacttaatgatgatggtggatatttcgatttagcacctacagatttaggtgaaaactgtcgtcgtgatattgttttagaattagaggatatgggcttcgatattgaagctagtcaccatgaagttgcccctggtcaacatgaaattgactttaaatatgcagatgctgttacagcatgtgataatatccaaacatttaaattggttgttaaaacaatcgcacgtaaacataatttacacgcaacatttatgcctaaaccattattcggtgtgaatggtagcggtatgcactttaacgtttcattattcaaaggtaaagaaaatgcattctttgatccaaatactgaaatgggcttaacggaaactgcatatcaatttacagcaggtgtgcttaaaaatgcacgcggatttactgctgtatgtaacccgttagtaaactcatataaacgtttagtacctggttatgaagcaccatgttatattgcatggagtggtaaaaaccgttcaccattaatccgtgtaccatcttcaagaggattatctactcgtatcgaagtacgttcagtagatccagctgcaaacccatacatggcgttagctgcaatcttagaagctggactagatggtattaaaaataaattaaaagttccagaaccagttaaccaaaatatttacgaaatgaaccgtgaagaacgtgaagcagtaggcattcaagacttaccttcaacactttatactgcattaaaagcaatgcgtgaaaatgaagttattaaaaaagctttaggaaatcatatctataatcaatttattaattcaaaatcaattgaatgggattactacagaactcaagtatctgaatgggaaagagatcagtacatgaagcaatattaatacgctaaacaatgatgggaaataagtaatatcaagggctagagcgttttgctttagctcttttttgatttggaaagatgggatttcacttgaccacttttgttaaaaaatggatttggtcaagttttggtcaagtaaatgttttatgtatttatttttttaaagctggggaagaccattttatattttagttcacatgaattttaatatatttggaggtgatgagatgaggcgataaaagaacgtcgcgaaaacgttgagtattacttgaaaatagccatattcatattacttctcatcgaattcatttgcagaacgttctaaggtaagaccccgaaaagagggaccttactacgcattattaagggggtaatactatatgaaaagagaaacaaaacaaaaaatatctttttgtttatcgatcggtattttcattttagttatactactattgatattctaaaaaattaaaaatttcgcctcatctaatttatgaattgctatgatgaaatattcaatacaatcaaagaattgatagaaaacaaagagatatcgagttatcaaattaataaagatactgggataagttacggtaatattaatgctatgcgccgtagagaaagaagaatagaaaatttaagcttaaagaatgcaaagatcttatatgaatatgcgaaaaaggtattgtaatataagcattgagttcaataggcatacaataactgcccaaactagtgactgagtgggtgcttttatagtattaaaagttttctaaaagtgaaagaaatcatgtttagtgatttacttatgtttttcaaaatagtataataattttatataatatatagagcttcagtataccttttgagtatatatggagttctttctttttatacaagatgtatatgtataaatggaaatatttaatacattacataaaaacctttaggtgcacttagagggatgttaatcataaaaaaagagattttgaaaaatataggctattatactttagaattacaaattataaatcttgccagtggatatgggagttcaacatgtcacttaccccaatttgtggaatgttaaataactataaagaggaaaggagaaaaaatgataagaatggttaaagaaaaagaacgaatagcaaaattaaatttcgaatagctgtgacgagcttaataattcaagtacttaattttatcaaatcgttcttttaaaaaggtaaagggcaaaagacctttaccacattaaatagggaggtggtatttatgacaagagaattaaggaaaaaattaactctctatcttaacattgcaactttaatattatttattattaatttaactagaaaaaaataaattattctttcattttgacaaaaattatgaaccagtttaaagaaatttataatacaatagaaaaattactaaatgataaatcaatatctaattatagaattaatcaagacactgatgtttcttatggtggtataagtgaattaagaagcgggaaaagaaaagtgaataatttaactttagaaacagcggaaaaactctataattaccaaaaacaattagaaataatgattgaagattaaaataaggccatatttttgaaatatcatggagtgagccttttaagtcatctaattttaaagtatattaaatatggataacttaatgtgaatataaataaaaaattatcaaataatataatatagaatagatggagacaagaaattttatcaatatataaaaaaaacgccaatactattaggtattagtttatgaattaactagtttggcaactagaaaaaaacaatgtattgctaaacgtagttactgcattaggattattataattataaatagaaagagagcgtgattaaaaatgaatgagattgaaactattataagtgaaatagaaaagttattaactaacaatacaccatatagtatttcaaaaaattcaggtgtaccacgtcaaacagttacagatttaaaggtaggtaaaactaaaataaaagaagctaaatttaaaacgataatcaagttatatgaatatcaaagaacattagaaaataaaacagaatgttaacaaaaatattttgttaggttaggtggacaagaaattaaatttctaatgatttcatggttgtctgtccacgttttgtccacctcaataagataaactcttagttttagaaattgtacatggttaaataatcaaaaatgcatattatgaaattatcattgccattaaatcttgaataatctttaagtgatgatattaaaggctgaacacagtaaataagttaactttaatgcagtattctatactatacatattttgtaataatgtttatgtgcataatttttcattgacaattttttatattaaattgtgtaattggcatatatgatgatttgtgataattatattctaatatagcatttgattttatgatttttaaaattaatagatttgaaaagtatactttatttcatgaaagtttttggtacatttatttgaaaatgtttttattacaaagttacatgcctaaatgtttcttaacaaaattaattcatcgagtgtaaagaatcgtgtggtaaacataatttatatagattataaggaggtgaaaatggtcgaggaagtaaaaacgataaaatagtttgaatgttttgattttaattctgataggactattgaatttgcaaactaataagaatgtgagatttgatttaatacgaagtcatattctttgaataaaatattactttctcaccattagtaaaatgaagatgactattaaagtgcgaaaaacaaataaaaaagagaaaatagaatttttaatagggacgtttataattattttagtaatattagggttcaaaattatgaaataaatgtatagtatttgagaagtctatatgactccggaaaaattaaattctaaagatatctcaatatctcaaatttaatagactactggagttagtagtttgaatattgaaagacactaatctaataaaaatacataaaaggttaaactttagaagtggctgtaaacttcaatgaatactaaacattgaagttttgtaaaaggcgtaaggtatacaagacaaatcgtttatctttgacaaagtaattgatgatgaaaagtcgttaatatgtagaaacaaaaattgaaaatataaaatttaactattatgaagtgatgatagccattaatgaatagaaaaataataaaatcatttatagataaaaaatacgttaagttcacagaatttcgaaaaaaagcagaaaacattgtacagatatggagatgaaaaaatgtcagaatacaagaaaaaaataattgaattaattgaaagtaatttaacaggatatgaaatttctaaaaaaactggagtttctcaatacgtactttcacaattaagacagggcaaacgcgaagtagataatctaaccctgaatacaacagaaaaattatatgaatatgccaataaagttttgtaatttaactaatgtataaattaatcaagctatgtttatttgatttaactattaataaaaatcatatggtgaatggatattataataattaaaatacaaaaatagtagattccaatttgtgaaaaaggagtatgtcgtttcatttagaatttattgcacgaaattagcatcgaataagggaaaataagtgttaagttttaaatgataaaaaagattggaatggatcgtcttgaaatgctcccttcaaagttttcattttttcaatgtcgacttcgaagggggcattttcattaaattgttatagctttttatatttgtataatgaacatataagtttaagaaggtgcgagtgaaggaaataaaaaagctcaaatgtaccaaattgttaatcttaataaatctctactttataaagattgaatggacattcgagcgttaatcagtcaggagggaatttcactcctacaatttaataataatacttgcttcaccactgtacaaggagtgatttgttatgttcaaagtgaattattcgattttaagttattatccagaatataatatcgcagtaagttggcaacgtttaagagaaggaaaaacaataaaaaacaagatttaatactgctgcgtcatgaggcgcttgaacattatttgatgaataagtataatttcaactatgattatgcacataaaattgtatcaaaaaaatacgattattcaatttttataaaaaagaaggtggattaaatgcttacattaataaaattgaaagaagatgaacaggttataatatatgaatatatacctgaagatgatataagtaacggtaaaggttcagtaacttttaataaaaaagatgcagaggttatagatttctcattatctgaaatagaaaatgaagaatattttatgttatatcgtaataagtctttttctgtagtaagagactttatcgagaagcaagaatttcccgaaaattataaaatagcatggtattaatgcatcctttctagacagataaagagaaagtggtgctatttttatatgcttttttaactatttactgaaatagcagaatcacaaaagttaacatatttaaaagaacttggtgaagatggcgaatataaatatgttgccaaaatagatagtaaaacgtctaaactatgtcattcgctcaacggcaaagtatttaaagttaaagatatgataccaggtgtgaatgcgccacctatgcatccttggtgtagaagtaccacagtgccacatgttggcaattggtgagacaagttctttaaagagcgtgaaggtaaatatcaagtagaagatgacacaaccaaagatgaattacaacaagctaaagtattaggaaagaaaatatatattactgatcaagcaattgataaagtcagatatgttgatattccaacacataccaaagaagaaaatcaatttatacaagaacaacataaagccttgcttaaagatgccaaagaaaacaatgatagcaatgaagtagcttatttattaaaagatggtaaagttacaaaagtatatggtgatcaagatagtgtatcttttgcaccaggggaaaaagcaacagaattgttatttaacagtaaaccgaattcaattgttatgttacataaccatcctgggcagtctagtttttctcttacagacttgtatttatttatatttaataattctattaaaacactgacaattgttacaaataaaggtcaaacaaagtacttaactaagacaaaagaatattgcaaatcaacttgtattgattgtattaaaaaatataataaaaataagaatataaaaaaattcaatcataaggatattgatatgattctaaagagattatataatagtggtaacataatatataaagttaggtgattaaaatgtattttgcacagttagatggtgaaataactaataaacagtcacaagaattattggataaagaatacaagaaagcaatagaattagaaaataagaataaagaacaaaaattagaaaaatagcatcctttctacacagataaagagaaagtgctgctatttttatacacttttttaaccttccaatgtgaaggttattttttattgtccaaaacgtgctgatgacattttaaaagcaagtatggaatatcagtcgacagactataaacggaggtatgtctcatggagaaaaatgaaagtaatattactgacgtaactcagaacgaagagcaactagacaacagtgatgaacaatcacaacagaatgagaaaacattttctcaagaagaagtatcacaattgattaaagagcgtatagctagagaacgcaaaaaatcagatgaacgtattaaagatgcggttcaagaagctgagaagttagctaaaatgaagtagcttatttattaaaaggtgctaaagttacaaaagtatatggcgatcaagatagtgtatcttttgtgccagggtaacaagcaaccgaattattatttaacagtaaaccgaattcaattgttatgttacataaccatcctggacaatcaggattttcattgaatggtttaaagatgtttattggaaataaatctatccaaacaacgactattgttactaactatagtgtagtaaaacatataagtaaaacttcattatataatcagtctcaagtttataaaattatgaaagatataaaacaatctataactatgagaaataatgaagcgatagttgataatattctaaagcaactttataataaaacatatataaaacgaaaggacaaataggagtaatacattatgtcaattcaacaattagatggttacatttctatagaagatttttttaagcatatggatgaattatcgaagaaagaagaattagaaaaagaaattaatcaatcaaagtctaaatatcaatagcatcctttctacacagataaagagaaggtggtgctatttttatacgcttttttaactatttactgaaaatgcagaatcacaaaagttaacatatttaaaagaacttggtgaagatggcgaatataaatatgttgccaaaatagatagtaaaacatctaaattatgtcattcactcaacggaaaaatatttaaagttaaagatatgataccaggtgtgaatgcgccacctatgcatccttagtgtagaagtaccacagtgccacatgttggcagttggcgagacaagttctttaaagagcgtgaaggtaaatatcaggtagaagtaaaagaagctaaattacaagaaaaagctaaaaaccagatgaaagaaatgattgaaagttgtaaaatgaaaatagaaataaattgtgaaaaacaaaatggacatatgttaggtcatcatctatataatgaaaataaaaaaagagccattttaaataataagaaattgcctagctatacaatactttctatagatttattgaatgaattgttaagagaaaaaatgtcaacaggcaatctaatattaagtgatgagctatttgatatgaaagagattattaattttaatcaaattattggaaaagcacatatcgataatgtgtatattgaaaccagaaaaggaaaagtgcattattcgaagacaggtgctcatatagtaccttatattgataagtaggtgaaaagtattgagaattgaagatgcatatcgtaaagatgttattatcacgcttttgaataatgaagaatacgaagggtttgtaactgactatgaaaatgaatttgagagtgaaacaggaaatcttgttgtagatatacagactgattttgctgtttattcgtttgatgaaactgagataaaaagtattagattattaaaataatttctaaatagcatcctttctacacagataaagataaagtgatgccattttttgcgcttttataacaactaaggatacaagacacataccttcaacaaaatcttcatctaaacctatcgatttcctaagttcaattttaaacacaaagtttatttgtaaagatgcacacctataaaaatcttaatcatcgaaatgtcacaaacatctccatattaaaaacttaaatagtgcattccatttaaactaaacatcgatattcctaccaaaatagatttagtaattcaaatgataatacatcactttcataaaataactataaccatcataatacttctcaaatctcgtcaaattaaagtaaatacagcacaaattaacatttttaaatatataaaataaaacaagatactcaataatctgtagtaccttgttttggaataatgtaattttatatcatcaacggctacaaatgagcagtttcatatataaataaacacaactactcaactaatcttgattaattaataaatgatttgccagatgacatataacagcattattagattaattctaatagtttatttaaattttcttcggttgtcgcccagctggttgcgaatctaacaacacgatgttgatcatcgtatttttcccaaatagcaaatttaactttttgttctaactctgctattttttcgttacttaaaataaaaaattgttgattggttggagaatcaaagtaaagacgatagcctttatttataaacccgtctttcatcttatttgccatttcgatagcatgtctgcttatattaaaatataaattgtccgtaaataattctaaaaattgtatgcctgttaaccgtccttttgctagaagggcaccgtgatgcttgattcgagtggtaaattgtttcggttcattatttttcgtaaaaacaatggcttccccgcataatgcacctatcttcgtaccacctatataaaatacatcacaatatttagcgatgtctttaatagtcatatctgattggtcactcatcaatccataccctaatcgtgcaccatccataaataatggaagctgatattgcttacatactttacataactctttcaattctgatttagagtataatgtgccatattctgtaggatgagaaatatataccattcctgggaataccatatggtcctttttaaaatcacttttaaatgtctccatgtaagtttcaacatctgaagcactaacttttccttccttagagggtatagtaattactttatgtccactatattcaattgcaccgccctcatgcacagcaacatgaccagtgtctgctgaaataaccccttcgtaactttctaacattgaattaataacaacctgattggtttgcgttccacctactaaaaaacggatagtagcatttggacaatcaattgtatctttaatcttttcaattgcctgagctgtgaattgatcaaagccatatcccgaagcttgtacaagatttgtatctactaatcgttttaatactttttcatgagcaccttctaaataatcattttcaaatgagatcactacatttccccctaaaactaatatcagcattttaatatgataaactaatttcaaaactagttcgatatttaaaatgtattgtgaattgttaaagtttgtatcgcattatcgcgaagttgaataaatatattatacatcaaacaatacattaagaaaattaattaatttttaatcatagcgacttttcatgctggaacacatgtattaatgattgaattttactgttaaaagttctatgatttaggaaatagagaaaagaggggatttaaatggaacaaattaaacttaaaacttttacagctgagactttagagttattagaaaaaaacattaatgcttttttaagttctgaagaagctacaaatttaaaattagtaaatattactattaaagaaatagaagaaagaacattcccaaataatgaagaagaattcaatgcaattttaactttatctgtgaataaataatatgacgtgaaaggtgcaaaatgttttttgtgcctttctttataggagaaaagactatgcgatttacattttcaaacgatttaggaacgttatttactattattttagccattggattcatcattaatttagtattggcttttattattatctttttagaaagaaataggcgtacagcgagttcaacttgggcatggctatttgtactttttgtcttaccattgattggttttattctttacttgttttttggtagaaccgtttcggcacgcaaattgaataaaaacaatggtaacgtgttaacggatttcgatggacttttaaaacaacaaatagaaagctttgataaaggtaattatggtactgataacaaacaagttcaaaaacatcatgatttagtacgtatgcttttgatggatcaagatggttttttaactgaaaataataaagttgatcatttcattgatggaaatgatttatatgatcaagttttaaaagatattaaaaatgcaaaagaatatatccatttagagtactatactttcgctttagatggtttaggtaaaagaattttacatgctttagaagaaaaattgaaacaaggtctagaagtaaaaatattatatgatgatgttggatctaaaaatgttaagatggcaaattttgatcattttaaatcgttaggtggagaagttgaagcattttttgcttcaaaattaccgttattgaatttcagaatgaataatagaaatcatagaaaaatcatcgtaatcgatggtcaactaggttatgtcggaggatttaacattggtgatgaatatctaggattaggaaaattaggatattggagagatacgcatttacgtatacaaggggatgcggttgatgcactgcagttgcgatttattttagactggaattcgcaagcgcaccgtccacaatttgaatatgatgttaagtatttccctaaaaagaacggaccattgggcaattcaccaattcaaatagctgcaagtggcccggctagtgactggcatcaaattgaatacggttatacaaaaatgattatgagtgcaaagaaatctgtatatttacaatcaccatatttcattccggataattcatatataaatgccattaaaattgctgctaaatcaggtgtagatgtacatttaatgattccatgtaagccagatcatccattagtatattgggcgacattttcaaatgcctctgacttattatcaagtggtgttaaaatttatacgtatgaaaatggatttatacattctaaaatgtgcttaattgatgatgaaatcgtatcagtgggcacagcaaatatggactttagaagttttgaattaaattttgaagtaaatgcctttgtatatgatgaaaatcttgctaaagatttaagggtggcttatgaacatgatattacaaaatcaaaacaactaaccaaagaatcatatgccaatagaccgctgtctgttaaattcaaagaatcgttagcaaaattagtttcgccaattttataatttatttgtaaggagtctcgattatagaggctctttttattttgcccaaaattaaaataacgataaatatattatgtaaatctaataatgacatttgtcatttcaaatctatgacaaagtgttctattttaaatctaataaatttactaatattaaattaataaaatattaagaggtggttcatttgattcaaatatctaatattaataaatcatttaagaaaaagcgtgttttaaaaaacatttcatttgatattgaaaaaggttggatctaaatacaaacaaaaaagtattgagtgttttgatttaagagacttggaaagtgagtcaataatcaaaatcttactcaatacttttattttggtactcgcaatttagatttgttaactaattttttcgcttattataaaacgaaacaatcaagtaaacgataaagcctacaaagatacccaataaaatagatagtactgccgtcactattaatggtaatttgaaaaatatttgtaggaaaataccaatgataattgcgataattactgcaattaatgtgactgtattttcatttgaaatgttcatttattttcactccttaacaataacattatatcatgctatagctttccaaaatattgaaatatgtagatatggctattgacgatatttcttaacttttatatgattaatcggaatgaaaaaagagaagtaggtggcaatatgaagtcaaataaatcgcttgctatgattgtggtagccatcattattgtaggtgtattagcatttcaatttatgaatcatacgggtcctttcaaaaaggggacgaatcatgaaactgtacaagatttaaatggtaaagataaagtacatgttcaaagagttgtggatggtgatacatttattgcaaatcaaaatggtaaagaaattaaagttaggcttataggggttgatacgccagaaacggtgaaaccgaatacgcctgtacaaccatttggcaaagaagcatcaaattatagtaagaagacattaacaaatcaagatgtttatttagaatatgataaagaaaaacaagatcgctatggtagaacattggcgtatgtatggataagtaaagatcgtatgtacaataaggaattagtggaaaagggacttgctagagagaagtatttttcaccaaatggcaaatatagaaatgtatttatagaagcacaaaataaagctaaacaacagaaattaaatatttggagtaaataattaaataggtgattatatatattaaagtaaaatatacttgaagcatcgatttattattaccataaatttatatatagaaataatttaaaggcataataaccatagtgcgtatcgagcgtaatggattattatgcctttgattttacttgaatatagctgtgatttgatcaacctgttctttatttaaagggtgtttagatagctctatggcttcgctaataatacgtcgtaacgaagattttgttgaaactgtatcaacatatttatctctttcttcagaaccttgaatgatattaactgtaccatcactaaagtaaataacaccggtactttggactttaaagttaaagttttgttcaatatgatcctttaatgctttcgcattatttgctgctaattgatacggatcataatcataaaaatcataaataacacgatttggttgaactgtttctgtaaaagtatagatagactttcttgatgaattaaactgatcatgatattgctggctaatgtaatgaccgacaactttttcaatattactattgcttatttctgtatcatgctcatcaggtacatcaaagtgataaaatgttttttcaccccagctttttacatcaacgtttattaaaccgatatctgaaacaatgataaaatcaaatgaacgtgcatactcgaaaaacggatgtttagtagctaaattgcttgtaacgataatatcgtaatattttaatttaccattttcgagatagctatctaaaatcttgcgtaattctcttttagcatttttgtatgcatggtggccaacatcattattagaactcagcatttgacttcttaattcagcattttctgcacttaatgctttgttctttttaataagttgctttcttgcataaacttcggtatctattttactattactatacctttgatttaaaactaatataccaattaatgctacaatgataatgataagtacaacataaaaagacattttttcaccaatcctttttgacttctttaactttgtatacaataataattaataaagattaattgttattcaatttcccacatttttattagttgattttagttcatcattgttataatcaaattataaactgacagatattgatgttcaatgaatatgacgtgaaagattcgtgaattcaagtttatgtcgaatttatgttataacggtcatttaaatgacagaattaggtcactcatagtattttgaagattgaattcattaattttaaaatgtataatgatatttgtgaaagcgcttgcttaggaggtgtatttgagagtgaatgaaatgaatgctaaagaacaattagtggacaatttaatgaaaacatcatcgcaattatttaaatttcacggtgaagttgccatgcagcttttcttaaatgatgaattaaaattaccttctattgttgaaatatgcgtggaacgtaagcgtttaagtgatattgtgaaagttattccgcaatcatatgcgttactatacatagataagcaagatcaagcaatagctaaagaagatttatcactttcaaaaattgcaaaagtttatgtgcaatatgatgatacaacaataatgagtattttcgtttatgatgtagtaaacgatgaatggatttttagattggatccgaatatacgtatacctaagagtaacatatacttccatagtttaaattgggatgtggattatattaaaccggagatcgttctaatgtatgatctaatgcaacaccatcagtatcatcattattccaattataaacgagtcatagatgcattaagctactatcaattttttattttaaaatttgtagtaggtgagcaacgtattaaggatgcaatccagagaacaataaataattaagaaaaagcaattcataacgcagttgaatacatgtgttacgaattgcttttatattagtttttatcacacaagttttttaatgcaaccccgtgatagcaaaactcatatgtagataatacagctttttcagcatcatctacatgaattccaaacatcatcgagatttccgaagcaccttggttaatcatttttaagttaatttttgattcagctaaggcatgtgtaattttatttgcagtaccgatgactttattcataccttcgccgacaatcattaatattgctaaatcatgctcaatacttagctcatcaacatcacatttttgacgaatttcatttaatacttttgtttctttattttgaatttgttttgaacgcataacgatactgatagtatcaatacctgaaggcatatgatcaaatgaaatattattatcctctaagacacctaatatctttctagtaaacccgacttgtctattcattaaatactttttgatattaataacggtaaaatctttatcacaacttataccgctaatcacatttttcgcatttatttctctatcatgcactataaatgtacctttatcttgagggcggttcgtatttttaatcaccacagggatgcgatctttataaagtggttgtaaggcttcatcatggaaaacactaaaaccagcataagataattcacgcatttctcgataagtgatttcttcgattaattcaggatctttgatgatatttggattagctttataaataccagacacatcggtgaaattttcataaattgtagctctaacaccacttgatatgatggcgccagttatatctgatccgccacgtggaaatgtaactatatatccttcatgagatacgccgaaaaatcctgggataattagtttctcatcataatctcttaattttttaatttcagagtaagcactatctaatatttgtgcttcttgtgggacgtcagtaacaaaaatacccgcttccttcggtgatatatattttgttggtataccttgactattattatataaagctatcaattgcgcattaaaatcttcaccacaagaaagtaatgcatctaatagtctctttggttcattttttaattgattaatataatgttccaaagtcacatctatcgtccgtaaaatactttcatccatttgcaattcttttacaatatcatcataacgctgaataatttctctttttttatcatgataatcaagatgattaatgaccttttcatataatctgattaacaaatcagttgttttaatatcattatcatgtcttttacctggagcagaaacgataacaatctttcgctctggatcagaattaacaatatttaaaacctttttaatttgagtagcattggagacggagctaccaccgaatttggaaactttcatagtgcatgccaacctttctaaaaaatcagaaaattgtattcagttttgtaagtaagaatgatattatgtatttatattttgaatattacgaactttacaaaaataaagaataattctatactatactatcatctagtgtttttcaataatacatttgtttttctcaaaagcacaaacggaggtacataaaatgaaaaaattaaatatagcattattaggattaggtactgtcggatctggtgttgttaaaatcatcgaagagaaccgacagcaaattcaagatacattaaataaagatattgtcataaagcatattcttgttcgagataaatctaaaaagagaccgctaaatattagccaatatcatttaactgaagatgttaatgaaattttaaatgatgattcattagatattatcgttgaagtcatgggaggaattgaaccaactgtagattggttaagaacagcacttaaaaataaaaaacatgttattaccgcaaataaagatttattagcagtacatcttaaacttttagaagatttagcagaagaaaatggtgtagctttaaagtttgaagcgagtgtagcaggtggtattccgatcgtaaatgccataaataatggtttgaatgcgaataatatttcaaaatttatgggaattttaaatggtacctctaattttattttatctaaaatgactaaagagcaaacgacatttgaggaagcacttgatgaagcgaaaagacttggttttgctgaagcggatccaactgatgatgtagaaggggtagatgcagcgcgtaaagttgtcattacatcatatttatcatttaaccaagtcattaaattaaacgacgttaaacgaagaggaattagtggcgtaactttaactgatattaatgtagccgatcaactggggtataaaattaaattgattggtaagggaatatatgaaaatggcaaagttaatgcatcggtagaaccaacgttaattgataaaaagcatcaattagcagctgtagaggatgaatataacgcgatttatgtcattggtgatgctgttggtgacacgatgttttatggaaaaggagcaggcagtttagcaacaggtagtgccgttgtcagtgatttattgaatgtagcattattctttgaatcagatttacacacattgccaccacattttgaattaaagacagataaaacacgggaaatgatggattcagatgcagaaattaatattaaagaaaaatccaatttctttgtagtagtgaatcatgtcaaaggttcaattgaaaattttgaaaatgagttaaaggcaatattaccatttcaccgatcattaagagttgcaaattacgataatcaatcatatgccgctgttatagttggattggaatcatcaccggaagaattaatcactaagcatggatacgaagttgacaaagtatacccagtagaaggagtttaattataatgagaagatggcaaggattagtagaagagtttaaagcacatttaccagtaaatgaaaatacaccaaaattaacattgaacgagggaaatacaccactcattcattgtgaaaatatgtctaaaatactaggcatagatttatatgtgaagtatgaaggtgccaatccgacaggttcatttaaagatcgcggtatggtaatggctgtgacaaaagcaaaagagcaaggtaagaaaattgtaatatgcgcttcgactggaaatacatcagcgtctgcagcagcatatgcagcgagagcaggtttaaaagctatcgtcgtaataccagaaggtaaaattgcattaggtaaattgtcgcaagcagtaatgtatggtgcagaaatcgtttctattgaaggaaactttgatgaagctttagaaattgtaaaagaaattgcaaaaagtggcgaaatcgagcttgtaaactctgtcaatccatttagaatcgaaggacaaaagacaggctcatttgaaattgtacaacaattagacggtgaagcacctgatattttagcgattcctgtaggtaatgcaggtaatattactgcatattggaaaggctttaaagaatatcatgaagctaaaggatcacaattgccgaaaatgtttggcttccaagctgaaggcgcatcaccaattgttcaaaataaagtcattaaaaatcctgaaacgattgcaactgctattcgaattggtaatcctgctagttgggataaggcgactaatgctcttaaagaatcaaatggattaatagatagtgttactgatgatgaaattctagaagcatatcagttaatgacaactaaagaaggtgtctttagtgaaccagcgagtaatgcttctattgcaggtttaattaaattgcatagacaaggtaaattacctcaaggtaaaaaagtagttgctattttaactggtaatggattaaaagatcctgatactgctatttcactactagataatccgataaagccattgccaaatgataaagatagcattatcgattatattaaaggagctttataacatgtcgaatgttttggagttaacaattcctgcatcaacagccaaccttggagttggctttgattctataggtatggctttagataaatttttgcatctgtctgtaaaggaaacatcagggacaaaatgggaatatattttccatgatgatgcatctaagcaattgcctactgacgaaacaaactttatttatcatgtagcacaacaagttgcttctaaatatagtgttgacttgcctaatttatgtatcgaaatgagaagtgatattccattggcaagagggttaggttcgtcagcttctgctttagtaggagctatatatatcgcaaattattttggtgatatccaactgtctaaacatgaggtattacaattagcgactgaaatcgaaggacatcctgataatgttgcgccgaccatttatggtggtttaatcgctggatattataatgatgtctcgaaagaaacgtcagttgcacatatcgacataccagacgtggatgtgattgtaacgataccaacttatgaactaaaaacagaagcatcaagacgtgctttaccacaaaaattaacacatagtgaagcggttaaaagtagtgcaattagtaatacaatgatttgtgcattagcacagcacaattatgaattagcaggtaaactcatgcaacaagatggctttcatgaaccgtatcgtcagcatttaattgctgaatttgatgaagtgaaaacaattgctagtcaacataatgcctatgcaactgtaattagtggtgctggaccaactattttaatatttagtcgtaaagaaaatagtggggaattggttcgctctttaaatagtcaggtagtatcatgccattctgaattggtcgatattaatatcagtggtgttaaagaacgaattgtataccaatagacgctttatattgtaaaatagtattaaatgcagaatagagaggagatttaatgcgatatgacaaattataaagttgtcgttttagatatggatgacacattgctaaattcagataatgtgatatcagaagaaactgcaaattatttaacagcaattcaagatgaaggttattatgttgttttagcatctggtagacctactgaaggtatgattccaactgctagagatttaaaattacctgaacatcatagctatattattagttataacggtagtaaaacgattaacatgactaatgaagaagtagaagtaagtaaatcgattggtaagcaagatttcgatgaaattgtagattattgtcgagacagaggctttttcgttcttacatatcatgatggtcaaattatttacgacagcgaacatgagtatatgaatattgaagcagaattaacaggtttaccgatgaaacgtgttgatgatatcaaagcgtatattcaaggcgatgtacccaaggtcatgggtgtagattatgtagcgaatattacagaagctagaattgatttgaatggtgtgttcaatgataatgtagatgctacgacaagtaagccattcttcttagaatttatggccaaagatgtttcaaaaggtaatgcaattaaagcgttatgtcacaaattgggatattcggtggatcaagtcattgcttttggtgatagtatgaatgataaatcaatgtttgaagtcgcaggtctagctattgctatggggaatgcatcagatgaacttaagcaatatgcagatgaagttacgttggaccataatgaaaatggtattccacatgcgctcaaaaaattgttataaattttaaaataagccttaacacatgatatttgaataagatatcttgtggttaaggctttttatttatgtgaaaatgacttcagttatactatggaggatttgaaatacatattttagattagtaatgatatcaaacgaatagagtaaatgtatattttttgaataaatcaagtattaactagtcactgaaggtagataaataaatttgatcattctgaataataacgaatgcattaaaaaatgcagtgacaatctaacattaattgttaaaatcactgcaagcatcttgattttatttagctgtttgtgtccagtcatgcttacctctgaaacgttttacatgagcatatatttggtcagcagtataatctaaatttgtataaactgtaatactgaacgctgattggttttcagcaaatgattcttcggaaaataattcctttaagtgcataaataaatcattcatttgtttatggtttaaaccgggatattcccttaaagttctctttaataattgtccgttcttttcttctaatgcttgaactacaataacaaatctttcatcttgctttagtacatcatcaaataaatttgtttgtccaatcattgaatttcacccctgaaaagttattgttatctatattatacacgatatgcaaaatatctaaaataaagaatggtaacatggtaataataaaatataaacagaatactagttaatacactttatactagaaaaagatattaaagtatatctgctttacaccattaaaaagcggcaaatgctatagataatctaaagcatctgccgtatgagaatttatttatttttgattgtcataatcgtgtggttttaaattaattgtttctagctttacaaattttgttttgtgaatgattttatgaataaagtaaatcaacgctagaatgattaaaggtaaaaagtttttaaaagcatttaaccattgatcttttaaaatatattcaactgagccaccaaatagcaagaataatagtgtagtgatgacaatgattggtcctaatggataaaaaggtgctttatatggtaggaccttattagggtcttgaccttgttttttaatagcttgtcgcaatcgtatttgtgaccaaatgcttgatccccaaacaactataatcattgaaccaataatttcaagtaaattaaaaacggcatttgaattaaagtttgcataaataataacaataacaacgactgcataagtagttaataatgctcttaaaggtaacttagttgtcttgtttaatttacttaaaaattggggtgcttttttgtctgaacttaaggaatacaacattctgcctgttgtataaacacctgaatttgcagcggataataatgaagttaaaataaccgcgttgattactgatgctgcaaaggctatgcctactctatcgaatacaattgtaaatgggctttgacttattgaactacttgctcttaataatgatggatctgtgtacggaataattgcaccaattactgcaattgataagacatagaataaaagaatacgccaaaatacttgtttaattgccttaggcatagactttttagggtcatctgattcaccagcagttactgctactacttctgtaccaccaaccgaaaatccggcgactaataatacgcctaagaaaccagagataccaccaacaaacggtgcttggccttttgtatagttttcaaatccatatgtatgaccacctaagataccgaaaatcattaaaaagccaaaaataacgaatacgataattgttaacactttaatcaatgataaccaaaactcagtttctccaaatgattttacagaaaaaatgtttaataatagtaaaattgtaataaagattaagctccaagtaatggggtggaaaaatttaaatgtgtcccagaaataaagcacatttgacgctactatgacatcaacacttgtaactaatgaccacaatgcccaatacaaccatcccatggtaaagccaagagatgagtcaataaagcgtgttgaataagagctgaatgaacctgatactggataaaatgttgccaactctccaattgatgacattaagaaatatagcatgacaccaataacaagataagcgagtatagcgcctccaggaccagcttgagaaatgatattaccagtagctacaaatagaccagtcccaattgcaccacctatagcaatcatggaaatgtgtcttgagttaagactacggttcattttattatcttccatatttagtctcccatctatttaaatatacccattattgtaagctttttaagtgtactattcaataactatttagtactgtaaagcgaaaaaattaaaattttctgattttttaatcatcttgagcatgtttaattgtaattttgatggggttaaattataatatgtattaaattataattattataaattgtggagggatgactatgtcacaacaagacaaaaagttaactggtgtttttgggcatccagtatcagaccgagaaaatagtatgacagcagggcctaggggacctcttttaatgcaagatatttactttttagagcaaatgtctcaatttgatagagaagtaataccagaacgtcgaatgcatgccaaaggttctggtgcatttgggacatttactgtaactaaagatataacaaaatatacgaatgctaaaatattctctgaaataggtaagcaaaccgaaatgtttgcccgtttctctactgtagcaggagaacgtggtgctgctgatgcggagcgtgacattcgaggatttgcgttaaagttctacactgaagaagggaactgggatttagtagggaataacacaccagtattcttctttagagatccaaagttatttgttagtttaaatcgtgcggtgaaacgagatcctagaacaaatatgagagatgcacaaaataactgggatttctggacgggtcttccagaagcattgcaccaagtaacgatcttaatgtcagatagagggattcctaaagatttacgtcatatgcatgggttcggttctcacacatactctatgtataatgattctggtgaacgtgtttgggttaaattccattttagaacgcaacaaggtattgaaaacttaactgatgaagaagctgctgaaattatagctacagatcgtgattcatctcaacgcgatttattcgaagccattgaaaaaggtgattatccaaaatggacaatgtatattcaagtaatgactgaggaacaagctaaaaaccataaagataatccatttgatttaacaaaagtatggtatcacgatgagtatcctctaattgaagttggagagtttgaattaaatagaaatccagataattactttatggatgttgaacaagctgcgtttgcaccaactaatattattccaggattagatttttctccagacaaaatgctgcaagggcgtttattctcatatggcgatgcgcaaagatatcgattaggagttaatcattggcagattcctgtaaaccaacctaaaggtgttggtattgaaaatatttgtccttttagtagagatggtcaaatgcgcgtagttgacaataaccaaggtggaggaacacattattatccaaataaccatggtaaatttgattctcaacctgaatataaaaagccaccattcccaactgatggatacggctatgaatataatcaacgtcaagatgatgataattattttgaacaaccaggtaaattgtttagattacaatcagaggacgctaaagaaagaatttttacaaatacagcaaatgcaatggaaggcgtaacggataatgttaaacgacgtcatattcgtcattgttacaaagctgacccagaatatggtaaaggtgttgcaaaagcattaggtattgatataaattctattgatcttgaaactgaaaatgatgaaacatacgaaaactttgaaaaataaatttgatatgtagtttctatattgcgtagttgagcagtttatgatatcataataaatcgtaaagattcctaacaagagagggtgtttaacgtgcgcgtaaacgtaacattagcatgcacagaatgtggcgatcgtaactatatcactactaaaaataaacgtaataatcctgagcgtattgaaatgaaaaaatattgcccaagattaaacaaatatacgttacatcgtgaaactaagtaattcttatcattcaaatacgacgatttgaaaataaagcgggcttacctattatattggggagctcgcttttttatgaaatttttgtgaagagtgattaatggattgagtttcatcggtagaacaatatatgattatattagttgttactttattaaaatttgagaatatttatagaaggaaatagattactgattttataaagtcactttgttagcgaatgcttgaaagagtatttaatatagtagaatttaaaattttaaagcggaatttaataagtacgaagtaattctgggtatgttttataaatgttcgacaatacactttaatgttaaatatgatggtttagaaaatgatttaacaaagaaatgaaactttactgttgaattatgtgaggattgtgttattatataaatcgtaataattacgatttgataaaaagtgaggtaactatatatggctaagaaatctaaaatagcaaaagagagaaaaagagaagagttagtaaataaatattacgaattacgtaaagagttaaaagcaaaaggtgattacgaagcgttaagaaaattaccaagagattcatcacctacacgtttaactagaagatgtaaagtaactggaagacctagaggtgtattacgtaaatttgaaatgtctcgtattgcgtttagagaacatgcgcacaaaggacaaattccaggtgttaaaaaatcaagttggtaaaatcaaatttcgtactttagcccatttacaatatcaataaaacaatgtacagtatatacgaatgctataaactgaatgttttctcatattaataaggaaacattcggtttttaatttgcatttaaaaataattagtttttaaaggggctatttaaagtgaaaatatttgattacgaagatattcaattaatacctaataaatgcatagttgaaagtaggtctgaatgtgatacaactatccaatttggtccgaaaaaattcaagctacctgtagttcctgcaaatatgcaaacagttatgaatgagaaattagcgaaatggtttgctgaaaatgattacttttatatcatgcatcgttttgatgaagaagcaagaataccttttataaaacatatgcaaaattcaggcttatttgcatctatttcagttggtgtaaagaaagcggaatttgattttattgaaaagttagctcaagaaaaattaatccccgaatatattacaatagatattgcgcatggtcactcagattcagtgataaacatgattaaacatataaaaacccatatacctgatagttttgttattgctggtaatgttggcacgccagaaggtgttagagaattagaaaatgctggtgctgatgctaccaaagtcggtataggtcctggtagagtttgtattacaaagattaaaacaggttttggtactggtggttggcagttagcggcattaaacatatgtagtaaagcagctcgtaaacctttgattgccgatggtggtataagaacgcatggcgacattgctaaatcaattagatttggtgcatcaatggtcatgattggttcattatttgctgcacacgaagaatcacctggtgaaactgtagaacttgatggtaaacagtataaagaatattttggtagtgcatctgaatttcaaaaaggcgaacataaaaatgtagaaggtaaaaaaatgtttgtagaacataagggttcattaatggataccttaaaagaaatgcaacaagatttacaaagctcaatttcatatgccggtggaaaagacttgaaatcattacgtactgtagattatgttattgttagaaactctattttcaacggtgatagagattaatatttatagtaggtgatgtaaattaaaaaattcatagtaactgttgttgcgtttttatcaattattatcattgcgccaataacagaatttaaaccattcattcatttacaaaatgaagtaagacaatatattgacattcacatcaataaagaaacaatttctgcggaaaataaattggatacaccgaagaaacaacaatttgcctttaataatatacaaatgaacatgtcgaaatcagatgttgagaaaacattaaataaaccaaaaagagtgacatttaatgaatatggtacgaagtggtatacgtattatgatgacgattacaataattttataatgataagttacatgaaagataaagttaatgcgttatatacaaatcaaaatataatcacttcaaaatcaaaaattaaatacaatacacctaaatcggttgtaaggcaaagattaggcgaaccagaaacagagattgttaaaggtagagtgcgttacgaacaaaataataaagaatatgatgttttccataaaaatcacatttatacgacggtattttatgataagcatcgacgtaataatgtaacagctgttttacaagtaagtgatgctatggaaaatagattaaaagaacaatatggagcaccttcgaaatcgcttgcagatagttttgaactacaaaattttgatttagttaatgctgaaagaaaacaacatcaattatttacattgaagtattctaaacagaattctgaaactgcacgtaagcatagtaaagatatggccaacaatcattattttgatcatacaaatttaaaaggtcaatcaccatttgatcgattgaaaaaagatggtattacatttaactcagccggagagaatttagcatatggtcaagttagtagtatctatgcacatcaaggattaatgaattctattggtcacagaaaaaatattttaaatgatacgtttaaaatattaggtgttggtgttgattttaatgatgaaaaacaacctttttggacagaaaattatactggttaatgtttttggtatgagtttaaagggtaatgtttgtctgtaaggaagtagataaacatgatgacaacagataaaccaaaagatgcggatatacttgaacgcgtcaaagatatacttaataaaaaagaaagaaaaaataataatggctcgctcctgtaaattattacgggggcgagttttaatttgtgtaacattttgcaggaatctgtaattcaaaatttatattaaagaatgagattatctaacaattcgcaatttctgtttgaactgaatttagattagaataaataaaacctcttgaaaacgaaactttttcaagaggtccaaaatttataaaaatgagggtttaacaattacgataatatataacggtttaaaatattacatttcgcggtacaaaccaattactttcccaattacagcaacattgtcgaggtaaattggctccattgtactattttcaggttgtaatcgataacgatttttttctttatagaagcgtttgacagttgcttcatcttcctcagtcatagcaacaataatgtctccattttctgctatggtttgactgcgaacaattactttgtctccgtctaatataccagcctcaatcatactgtcgcctacgacgtttaatatgaatatgtcgctattatgtgtcgatgttaagtgttcaggtaatggaaaatactcttcaatattttctacagcggtaataggaacacctgctgtgactttaccaataactggcacatgaatcgtttcttccatattaatattatcatttgtttgatcacttacaatttctatagcacgtggtttcgttggatctcttcttatatatcctttttcttcaagacgtgaaagatgaccatgaacagttgaactggatgctaagccaactgcttcaccaatttcgcgaacactaggcggataacctttcatttgaacaacttgtttaatatagttatatatttcgctttgtcgttttgttaattctctcatatataggcactccctaaattaatttaaatacagtatatcattaattcacaaccaaaacaaacatttgttcgttaaaatattgacacagaacataagttctgataaattacttatacaaacaaatgttctaggagtggaaatgatgttttacaataaatataaaaacgtatcaacatatatcatcatatttttagtttcaagtgcagcctttgcaatattcttgttaagtgcgaacgttagtgctcactcggaacaagtgtacgaaatgactgaccatcaaattaagaacaatacgataaataaagcatacgaacataaagaccctacaaacaatggcgaacaaagagatgggaaagtgttcgctttaataaattgatacattgtcacaacgttatttttcctatttttgcgaaatagcgtttttttattacttttttgctggtcttaaatttgttatattttgttaaagtattataatgattgaataaacaaattgaaggtaggttttttaattgagtaattctgatttgaatatcgaaagaattaacgagttagctaaaaagaaaaaagaagtaggattaactcaagaagaagcaaaggagcaaacagccttaagaaaagcttatcttgagagttttagaaaagggtttaaacaacaaattgaaaatactaaagtaattgatccagaaggtaatgatgtaacacctgaaaaaattaaagagatacaacaaaaaagagataataaaaattaaatcacaaatctgtaaagaattttctgacattataacttgaaataagtattttacttatctttttattttaaaataagttataatgtatttgataaaattgaagaagggaagatacacaagatgtttaatgaaaaagatcaattagctgttgatacgctacgtgcactaagtatcgacacaatcgaaaaagcgaattctggtcatccaggattacctatgggagctgccccaatggcttacactttgtggacacgtcatctgaattttaatccacaatctaaagattacttcaatagagaccgtttcgtattatcggcagggcatggttcagcattattgtatagcttgttacatgtttctggtagtttagaattagaagaattaaagcaatttagacaatggggttctaaaacaccaggccatcctgaatacagacatactgatggtgtagaagttactactggaccacttggacaaggttttgctatgtcagtaggattagctttagcagaagatcacctagcagggaaatttaataaagaaggatataatgttgtagatcattacacatatgtattagcttctgacggtgatttaatggaaggtatatcgcatgaagcagcttcatttgctggacataataaattaagtaaattagttgttttatacgattcaaatgatatttcattagatggcgaattaaacaaagctttttctgaaaacacaaaagctcgttttgaagcatatggttggaattacttactagttaaagatggtaatgatttagaagaaattgataaagcgattactacagctaaatctcaagaaggaccaacgattattgaagttaaaacaacaatcggatttggttcaccgaataaagcaggaactaatggtgttcatggggcacctttaggtgaagttgaaagaaaattaacattcgaaaattacggtttagattctgaaaaacgttttaatgtttcagaagaggtatacgaaattttccaaaatactatgttaaaacgtgctaatgaagatgaatctcaatggaattcattattagaaaaatatgcagaaacatatcctgaattagcagaagaatttaaattagcgattagtggtaaattgcctaaaaattataaggatgaattaccacgttttgaactgggtcataatggtgcatctcgtgctgattctggtactgttattcaagcaatcagtaaaactgtcccttcattctttggtggatcagcagaccttgctggttcaaacaaatccaatgtaaatgatgcaacagattatagttctgaaacacctgaaggtaaaaatgtgtggtttggtgtacgtgaatttgctatgggtgctgctgtaaatggtatggctgcacatggaggtttacatccatatggtgcaacattcttcgtatttagtgattatttaaaaccagcgttacgtttatcatcaattatgggattaaatgcaacgttcatcttcacacatgattcaattgcagtaggtgaagatggtcctactcatgaaccaattgaacaattagctggattaagagctattccaaatatgaatgttatccgtcctgctgatggtaatgaaacaagagtagcatgggaagttgccttagaatctgaatctacacctacttcattagtattgacacgtcaaaacttaccggttttagatgtaccagaagatgtagttgaagaaggcgttcgaaaaggtgcctatacagtttatggctctgaagagacaccagaattcctattattagcttcaggttcagaagttagtcttgcagttgaagctgctaaagatcttgaaaaacaaggtaaatcagtgcgtgttgtttcaatgcctaactggaatgcatttgaacaacaatctgaagaatataaagaatcagttattccatcaagcgtaacaaaacgtgttgcgattgaaatggcttcaccgcttggatggcataaatatgtaggtactgcaggtaaagttattgctattgacggctttggcgcaagtgcacctggcgatttagtagttgaaaaatatggatttactaaagaaaatatcttaaaccaagttatgagcttataagaataatttataaagcgagtatgtttagaagtctaggatgcataatcttaggcttcttttaaagtgttgaaatttagagtatagcacttaaactacatcataagtgataagttatgaaagtatactatttcagattaatctttaaaagctctgttataacagcatgatttttgatattatttttagtatcgatattaaaatacttgaataaactagttcttgaaataatgtgatgaatttagtaaaattcagtaggataaagaaagcgggtgaaacaatggcaacttggttagcaattatttttatagtagctgcattaattttaggtttaattggaggtttccttttagctagaaaatatatgatggactacttgaagaaaaacccaccaatcaacgaagaaatgcttcgtatgatgatgatgcaaatgggtcaaaaaccttctcagaagaaaattaatcaaatgatgacgatgatgaataaaaatatggatcaaaatatgaagagtgcgaaaaagtaaattcgcaattgatagaggctattttccagatatggaaatggcctctttttataatcaaattaataaaaacaaatatgtttattaaaattaaagttaacaaaatgacgaatagactgagaaatgctataattcattttgtatgatttacagagagtttatttaacgagaaggtgtctgcgtgctctatttaatattttcaatcattgtagctttatttatgggaactatagttatagttattcgtatgaaagctcaaaattatccggtaaatgagaaaaaaatagttttgccaccgttttttatggcgaccggtgcattgatgtacgtcgttccatattttaggctaacaggatcggaaatgctagaagcctttataattggtttgcttttttctacagttctaatttggacttctcgatttgaagtcaaaggtacagaaatttatatgaaacgatctaaagcatttccagttattttgatttcattacttatcattcgtactgtgatgaaaatattcattagtaatgaaatagatcctggagaattaggcggcatgttctttttattagcattctgtatgattgttccttggagagcagcaatgctatataaatacaaaaaactaaagaaaacattaatcaattaattacttttaaaaccacttgtgatcgacttctaaatcagtcgatgagtggttttaattttacttgaaaaggtgaaatgattatattaaaataaaagcgaacaaatgttctatatggaggcagtaatgaaaatcatacatacagcagactggcacttagggaaaatattaaatggcaaacagcttttagaagatcaagcgtatattttagatatgttcgtagaaaaaatgaaagaagaagaacccgatatcattgtgatagctggagatttatatgacacaacatatccaagtaaagatgcaatcatgttattagaacaagcgattggaaagttaaatttagaactgcgtataccaataattatgattagtggaaatcacgatggtaaagagaggttaaactatggggcgagttggtttgaacataatcagttatttataagaacagattttacatcgattaattcaccaatagagataaatggggttaatttttatacactcccttatgctactgtgagcgaaatgaaacactattttgaagatgacaccattgaaacgcatcaacagggaattacgcgctgtattgaaacaatagcaccggcaattgatgaagatgccgtcaatattttaattagtcatctgactgttcaaggtggaaagacatctgattctgaaagaccattaactattggaacggttgagtcagttcagaaacgtgtttttgatatatttgattatgtcatgctaggtcacttgcatcatccatttagtatagaagacgacaaaattaaatatagtggctccttattgcagtattcattttcggaagcgggtcaagctaaagggtatagacgtgtaacaattaatgatggcattattaacgatgtatttattcctcttaagccacttagacaattggaaattatctcaggcgaatataatgatgttattaatgaaaaagttcatgtgaaaaataaagataattatttacattttaaacttaaaaatatgtctcatattactgatccaatgatgagtttaaaacaaatttatcctaatactttagcgctgacgaatgaaacttttaattataatgaagaaaataatgctatagaaataagtgaaaaagatgacatgtcaattatcgaaatgttttataaacatataactgataaagaattatcggatatccaatctaaaaagataaaaaatattttagaaaacgaattgagaaaggaggattaatgaatgaaaccattacatttaaagttgaataatttcggcccctttttaaaagaagaaattgatttttctaaaattgataataatgaattgtttttaataagtggtaagactggatcgggtaaaacaatgatttttgatgcaatgacttatgccttgtttggtaaagcatcaactgaacaaagagaagaaaatgatttgagaagtcatttcgctgatggtaaacagccgatgtcagtaacatttgaatttcaattaaatcagcgaatttataaagtgcatagacaaggcccttatatcaaagaaggtaatacaacaaaaacgaacgctaaatttgatgtatttgagatggtggatggcaagtatgaaattagagaaagtaaagtaatttcaggtaaccaattcattattgaattattaggagtaaatgcagatcaattccgacaattgtttattttgcctcaaggtgaattcaaacgctttttaatatcaaacagtcgtgaaaagcaagggatattaagaacactgtttgacagtgaaaaatttgaagctatacgagaaatattaaaagaagaagtaaaaaaagaaaaagctcaaatcgagaatagatatcaacaaattgaccttttatggcaagaaattgaatcatttgatgatgacaatataaaaggcttattagaggttgccactcaacagatagacaaattgattgaaaatataccacttttacaagctaggtcgaaagaaatactagcatctgtaaatgaaagtaaagaaactgctattaaagaatttgaaataatagaaaagaaaacattagaaaataatatattaaaagataatattaatcaactcaacaaaaataaaattgatttcgttcaattgaaagaacaacaacctgaaatagagggaattgaagctaagttaaagttgttacaagatattacaaacctattgaattatattgaaaatagagaaaaaattgaaactaaaattgctaatagcaaaaaagatatttctaaaaccaataataaaatattgaatcttgattgtgataagcgaaacatagacaaagagaaaaaaatgttagaagaaaatggagatttaattgaaagtaaaatctcttttattgataaaactagagtattatttaacgatattaataagtatcaacaaagttatctcaatattgaacgcttgagaactgagagtgaacaattaggtgatgaattaaataatctaattaaaggtttagaaaaggtcgaagattcaataggtaataacgaaagtgattacgagaaaattatcgaactaaataatacgataacgaacataaataatgaaattaatataattaaagaaaatgaaaaagctaaagctgaattagataaactattaggtagtaagcaagagttagagaatcaaattaatgaagaaacatctatattgaagaatctcgaaataaaattagatcgctacgataaaacaaaattggacttaaatgataaagaaagctttataagtgaagttaaatctgctgtaaatattggagatcaatgtccgatatgtggtaatgaaattcaggatttagggcatcatattgattttgaaagtattgctaaacgtcaaaatgaaattaaagaaattgaagcaaatatccacgctataaaatcgaatattgctgtgcataattctgaaattaaatttgttaatgaaaaaatatcgaatattaatattaaaacgcaaagtgatttttcacttgaagtattgaataagcgtctgctagaaaatgaaaatgcattgaataatcaaagagatcttaataaatttatagaacaaatgaaagaagaaaaagataatctaacgttgcaaattcataataaacaattgcgtctaaataaaaatgaatctgagttgaaattatgtcgagatctcatcactgaatttgaaacactctcgaaatataataatatcactaattttgaggtggattataagaagtatgttcaagatgtgaatcagcatcaagaactctcaaaggagattgaagataagttaatgcaattgtctcaaagaaagttaattgagcaaaataatctaaatcactatgaaaatcaactagaaacttacaataatgacttagaattgaatgaacaatctattgaaatggaaatgtcgaggctgaatttaactgacgacaatgatataaatgaaataatagcctggaggggcgagcaagaggaattagagcagaaaagggatacttataaaaaacgttatcatgaatttgaaatggaaatagctaggttagaatcattaaccaaggataaagagttattggactctgataaattaatagatgaatatgaactgaaaaaaggaaagatgaatacactgatagatgaatactctgctgttcattatcaatgtcaaaataatattaaaaaaacacaatctatagtttcgcatattaattacttaaatcaagaattaaaggatcaacaagaaatatttcaattggctgagattgtcagtggtaagaacaacaaaaatcttacattggaaaactttgtattaatttactatttagatcaaattattgctcaagcaaatctgagattagcaacaatgtcagataatcgataccaactaattaggcgagaagcggtttctcatggtcttagtggcctagaaattgatgtatttgatttgcattcaaataagtctagacatattagctcgttatccggtggagaaactttccaatcgtcgcttgcattagctttagggttaagcgaaattgtacagcagcaatcaggaggtatttcactagaatcaatatttattgatgaaggattcggtacattagatcaagaaacgcttgaaacagcgttagacactttattaaatcttaaatcaactggtagaatggttgggattatttcacatgtgagcgaattgaaaaatagaatacctttagttttagaagtgaaatcagatcaatatcagagttcaacaagattcaaaagaaattaaaacataaaaaatagagatggtactttggaatgtatagaacaaccttagcccatctctttttatttaaaaattattttttctcacgtaataaatctctgatttcagttaataacacaacattttcttccacaactgcttcttcttcggcttcttctttcttcattaatgtatttgcaatcttaacaaagatgaataaagcaaacgcgatgataataaagtcgataacagattggataaataaaccgtatttaataccccagaatgaccattctttagcaaaatcaactgatccgaaaattttaccaattaatggcataatgatattttctactaatgaagatataatcttgttgaaagctgcacccatcacaacagcaattgctaaatctaagacgttaccttttaaggcgaactctttgaattcttttaacattacactcaacctctcttttttaaatgtaacctcaattatacaacaaataaaaaaattagaaaatagattattcaagaaaatttgattatcgcaaagacctttgttatcctataaaggtgcgtgagttattgaataaaatgtttagataatatttttattctactacataaaattaaatatagaattgaagggagtaattaattatgaattcttcttcaccagagaatccaaatggaaagaagtattcaccagtcttcatctatagtgcaattgttgttgctatagtcgtattacttggtgcatttttacctgaacaattcaactatgttaccaataatattaaaatgtggattacagaaaagttaggttggtattatcttattcttactacgattatcgtgttcttctgtatattccttatttttagtcctattggaaaacttaaactaggtaaaccaaatgacaaacctgagtttaatacaatttcatggtttgctatgttgtttagtgctggtatggggataggtttggtgttttatggtgcagcagaaccgatggcgcactttgctacgccacctacagcagatcccaaaactactgaagcttatactgaagctctacgttcaacatttttccattggggattccatgcttgggctgtttatggtgttgttgcgttagcgttggcatattcgcaattccgtaaaggtgaaccaggtttattatctagaactttacgtcctcttttaggtgataaagtagaaggtcctattggaatttttattgacgttttatctgtatttgcgacaatcgttggggtagccgtttcgttaggtatgggtgctctacaaattaatggtggtttacattacttgttcaatgttccaaacaatacgtttgtacaagcgattatcatcattgttgttactatcttatttatagcaagtgcatggtctggattaagtaaaggtattcaatacttaagtaacttgaacattggtttaggtactattttaatggtagctgctttaattgttggaccaactgttcttattttaaatatgttaactagctctacgggtagtttactaaacacattcttgtttaatagttttgatacagcagctttaaatcctcaaaaacgtgaatggatgtcttcatggacactttattactggggttggtggttaagttggagtccattcgttggagtgtttattgcacgagtttcaaaaggacgttcaattagagagttcatttctggtgtcttgctagttccagcaattgttagttttgtttggtttagtgtctttggtgtattaggcatcgagacaggtaagaaacacaaagaaatttttgatatgactcctgaaacacagctatttggagtgtttaatcatgtgccatttggcattgttttatcgttgattgcattattattaattgcatcattctttattacatctgctgactcagcaacatttgtattaggaatgcaaacaacatttggttcattaaatccatctagtatggtaaaagttgtttggggaatttcacaggccttaatagcatttgtacttttattagctggtggcggtaacggcgctgaagctttaaatgcgattcaaagtgctgcaattataagtgcattcccattctcctttgtcgtcatactcatgatggtaagtttctacaaggatgcgaaccaggaacgtaaattcctaggtttaacattgactccgaataaacatcgcttacaagaatatatcaagagtcaacaagaagattatgaatctgacattcttgaaaagcgtcagtcacgtagaaatatagagaaaaaagataactaataaagtttagttaagtattttaataacaagtagtatgtcattctagtagctagaacagatatactacttgtttgtttttgtggaaaattgagtatattcaaaaggataagaacgagaatttcgttattaaactacgaattctcgatttttttatattttaagataggtttatttctgacaacttaatagaaagaggtttgacaaagctaaagtgaagtacgacggtataaaaaaattaactatacttttatagaaaattaactcagactgggacatagatcaatattctatgctctacgaagttatattggtagtagttgactgaacgaaaatgcgcttgtaacaagcttttttcaattctagtcaggggccccaacacagagaatttcgaaaagaaattctacagacaatgcaagttggcggggccccaacatagaagctggcggaaagtcagtttacaataatgtgcaagttggggtgggacgacgaaataaattttgcgaaaatatcatttctgtcccactcccatcaaaagaatgacattgaaaagaaatattaaagtttggcgccacaattttctttctgctcaatgaaataatacgtttgaaaattgaattgaatcattcacgaaattgataattattctcaattaataaaaaatacttattacaccttacctgtatgataagttttgcttatatactctgattaaaaagtcaaaacctaaattaagcgttttctaagcatgatgagttgtttatcaataaatataataatacaatttaatcaaggcatataaatataaaaatgtatcaagggggatcattaaatggctgcaaattttaaagagcaatcaaaaaaacattttgacttgaatggccaaagttatacttactatgatttaaaagctgtagaagagcaaggcattactaaagtttccaatttaccttattcaattcgtgttttgttagaatctttacttcgtcaagaagatgattttgtaattacagacgatcatattaaagctttaagtcagtttggaaaagatggaaatgaaggcgaggtaccatttaaaccttctcgtgttattttacaagatttcacaggtgtaccagccgtagttgatttagcttctttacgtaaagcaatggatgacgttgggggagatattactaaaattaatccagaagtaccggtggatttagttattgaccactcagttcaagtggatagctatgcaaatccagaagctcttgaacgtaatatgaaattagaatttgaacgtaactatgaacgttatcagtttttaaattgggcaacgaaagcatttgataattacaatgcagttcctcctgcaactggaatagttcaccaagttaacttagaatatttagcaagtgttgtacatgttcgtgatgtagatggtgaaaaaactgcatttccggatacattagttggtactgattcacatacaacaatgataaatggtattggcgtactaggatggggtgttggtggtattgaagctgaagctggaatgcttggacaaccttcttatttcccaattccagaggttattggtgtacgactagtaaattcattaccacaaggcgcaacagcaactgatttagcgttaagagtaactcaagagctacgtaaaaaaggtgttgttggtaaatttgtagagttctttggtccaggtgtacaacatttaccactagcagaccgtgctacaattgcaaacatggcaccagagtatggagcaacttgcggattcttcccggttgatgatgaatctcttaaatatatgaagttaactggtagatcagatgagcatatcgcgctagtaaaagaatatttgaaacaaaaccatatgttctttgatgttgagaaagaagatcctaattatacagatgttatcgaattggatttatcaacagttgaagcatcgctttcaggaccaaaacgtcctcaagatttaattttcttaagtgatatgaaatcatcatttgaaaattctgtaacagctccagcgggcaaccaaggacacggtttagataaaagtgaatttgataagaaagctgaaattaacttcaaagatggatcaaaagctacaatgaaaacaggtgatattgcaatagcagcaattacatcatgtacaaatacatctaacccttatgtaatgttaggtgcaggtttagttgctaaaaaagcagttgaaaaaggcttgaaagttcctgaatacgttaaaacttctctagcaccaggatcaaaagttgttaccggatatttaagagatgctggcttgcaaccttatttagatgatttaggcttcaacttggttggttatggatgtacaacttgtatcggtaattcaggtcctttattaccagaaattgaaaaagcgattgctgatgaggacctattagtgacatctgtattatctggtaaccgtaactttgaaggtcgtatccatcctcttgttaaagccaattacctagcttcaccacagttagttgttgcttatgcattagctggaacggttgatattgatttacaaaatgaacctattggtaaaggtaatgacggtgaagatgtatatttgaaagatatttggccatcaattaaagaagtttcagataccgttgatagtgttgtaacacctgaattatttattgaagaatataataacgtatacaataacaacgaattatggaatgagattgatgtaactgatcaacctctatatgactttgatcctaattcaacatacattcaaaatccatcattcttccaaggattatctaaagaaccgggtacgattgttccattaaatggtttacgtgttatgggtaaattcggtgattctgtgacaactgaccacatctctccagcaggtgcaattggtaaagatacgccagctggtaaatatttacaagatcatcaagtgcctattcgtgaatttaattcatatggttcaagacgtggtaatcacgaagtaatggttcgaggtacgtttgctaatatacgtattaaaaaccaattagcgccaggtactgaaggtggttttacaacttattggccaacaaatgaagtaatgcctatctttgatgctgcaatgaaatataaagaagatggtacaggtttagttgtattagctggtaacgattatggtatgggttcatctcgtgactgggcagcaaaaggtacaaacttattaggtgttaaaacagttattgcacaaagttatgaacgtatccatcgttcaaatttagttatgatgggtgtattaccattagagtttaaaaaaggtgaatcagctgattctcttggtctagatggtacagaagaaatttctgttaatattgatgaaaatgttcaaccacatgactacgtcaaagttactgctaagaagcaagatggtgatttggtagaatttgacgctatggttcgttttgactcacttgttgaaatggattactatcgtcacggtggaattttacaaatggttttaagaaataaattagcgcaataaaaaatagatatcacagtaaaatttaaatcggtatttgaggcactttgatagtgctcaaaaatacttctataaactttatgatataataggtcggttcaaaacctttgtgttcttggccggcctcttcttgtattttatgttagaatgagatataaagttaaactgaaagaaggcttaaaatgatatatagtattacagaaatagaagcgcgttatgctgaaactgataagatgggtgtaatttatcacgggaattatgcaacttggtttgaagttgcgcggttggattatatatcgaagttaggttttagttatgctgatatggaaaaacaaggaatcatttcacctgtgactgacctcaatgtcaattataaaaagtctattttttatccagaaaaagttaaagttaaaacttgggttgaaaaatattcgagattacgttcagtgtataaatatgagatttttaatgaaaaaggtgaacttgcaactacaggttccacagaattgatttgcattaaagaagatacttttaagcctatacggttggatcgttatttcccagattggcatgaagcctatagtaaagtgcaaacgctcaataatgaagggaaaacagtagagataatggatggtattgattctttataagttactgtaaatgtttggagaggcaatattaacaattaatctataaaaaatagccaatacgttaacattaatgtaattagcgtgaagataagctaatatatagcaaaaacgaacttgttcatacaacatcagatgtgctaaaccaaagtacaacttccgaggttcagtacacatcagaatgtgtaaacaagttcgttttattttagttattttgtggaataagaaatttcatcttcgtgatcaactacatttacaataatgtggtcatcttcaaagtaccacaaatctttttccgctacgacaacatttaaatcgtcatattgttgttcatagccaatatcaacatcttcctttggttcaactgtaaaagcaggactaaatccttgcttgagttggaattcgccaccatatcttacaaaaaacacgagcactttattattttcaggcaactctagttcatttttaaaccaagttactgctgcatcagtaagttctatttgcataacaatgacctcctatatttattacagaatgggagtgggccaacttgtattatttgtggaatttcttatcgaaattctctgtgttggagcccaccccaacctgctcattattgtaagctgaatttccataagcttctatgttgggacccccgaccagaattgaaaaaacctagttataagcgcatttcgttcggttaactacagctaatataacattgtggagcctatgacattgatttatgtctcggtatcaaatgttcttgtaaaaaaactaagtatagttggattttaagttaaaaaaattgtttttgcaaaaataaaataatccatcaactgcaaaaaaatatgcaatgatggactaatgtcaaaaaattgttacatccattttattttaggttcttcgcctctaaaaatccttgcgatattagagcgatgtctaattatcaatatgattgaaactaagaaactaacgactaataaaatgtagtcttgaatgataagcgagccaatcacacagcaaattgctgcaacgatacttgctaaagaaacatatttaaaaatcttcaatacaataaagaagataattgcaagtattagtaaaagtatcggattgactcccaagacgacacctgcactagttgcaaccgctttgccaccttggaattttaaataaacaggataaacgtgtccaagtatagcgaataagccaacaattaaaccatttgtaaaaaaagtactaatagggccatctgcgtgaactggtaaccataaagggaagaaaacagttatgaaccctttgaaaatatctagaaatgttaccaagaatcctgcaggacgacctaatactctaaagctattagtagcgccagtattaccactaccaaattgtctaatatcttttttgaaaaataattttccaattacgaatccacttgggaaagcgccgataagataacttagtagtaacatgacgattatcatcataaatattacacatcctttaatatcttaggactattttatcatattcgtttaaattacggctaaaaattttaaaaacggggattaatatatggaattaagctatgaaagttaattgatacttgcattttacgctgatttatataagaataactattgtatagttttaaaaacgaacgtacgtttgcaggaggcgaaatcattggcaatgaataaacaaaataattattcagatgattcaatacaggttttagaggggttagaagcagttcgtaaaagacctggtatgtatattggatcaactgataaacggggattacatcatctagtatatgaaattgtcgataactccgtcgatgaagtattgaatggttacggtaacgaaatagatgtaacaattaataaagatggtagtatttctatagaagataatggacgtggtatgccaacaggtatacataaatcaggtaaaccgacagtcgaagttatctttactgttttacatgcaggaggtaaatttggacaaggcggctataaaacttcaggtggtcttcacggtgttggtgcttcagttgtaaatgcattgagtgaatggcttgaagttgaaatccatcgagatggtaatatatatcatcaaagttttaaaaacggtggttcgccatcttctggtttagtgaaaaaaggtaaaactaagaaaacaggtaccaaagtaacatttaaacctgatgacacaatttttaaagcatctacatcatttaattttgatgttttaagcgaacgactacaagagtctgcgttcttattgaaaaatttaaaaataacgcttaatgatttacgcagtggtaaagagcgtcaagagcattaccattatgaagaaggaatcaaagagtttgttagttatgtcaatgaaggaaaagaagttttgcatgacgtagctacattttcaggtgaagcaaatggtatagaggtagacgtagctttccaatataatgatcaatattcagaaagtattttaagttttgtaaataatgtacgtactaaagatggtggtacacatgaagttggttttaaaacagcaatgacacgtgtatttaatgattatgcacgtcgtattaatgaacttaaaacaaaagataaaaacttagatggtaatgatattcgtgaaggtttaacagctgttgtgtctgttcgtattccagaagaattattgcaatttgaaggacaaacgaaatctaaattgggtacttctgaagctagaagtgctgttgattcagttgttgcagacaaattgccattctatttagaagaaaaaggacaattgtctaaatcacttgtgaaaaaagcgattaaagcacaacaagcaagggaagctgcacgtaaagctcgtgaagatgctcgttcaggtaagaaaaacaagcgtaaagacactttgctatctggtaaattaacacctgcacaaagtaaaaacactgaaaaaaatgaattgtatttagtcgaaggtgattctgcgggaggttcagcaaaacttggacgagaccgcaaattccaagcgatattaccattacgtggtaaggtaattaatacagagaaagcacgtctagaagatatttttaaaaatgaagaaattaatacaattatccacacaatcggggcaggcgttggtactgactttaaaattgaagatagtaattataatcgtgtaattattatgactgatgctgatactgatggtgcgcatattcaagtgctattgttaacattcttcttcaaatatatgaaaccgcttgttcaagcaggtcgtgtatttattgctttacctccactttataaattggaaaaaggtaaaggcaaaacaaagcgagttgaatacgcttggacagacgaagagcttaataaattacaaaaagaacttggtaaaggcttcacgttacaacgttacaaaggtttgggtgagatgaaccctgaacaattatgggaaacgacgatgaacccagaaacacgaactttaattcgtgtacaagttgaagatgaagtgcgttcatctaaacgtgtaacaacattaatgggtgacaaagtacaacctagacgtgaatggattgaaaagcatgttgagtttggtatgcaagaggaccaaagtattttagataattctgaagtacaagtgcttgaaaatgatcaatttgatgaggaggaaatctagtgagtgaaataattcaagatttatcacttgaagatgttttaggtgatcgctttggaagatatagtaaatatattattcaagagcgtgcattgccagatgttcgtgatggtttaaaaccagtacaacgtcgtattttatatgcaatgtattcaagtggtaatacacacgataaaaatttccgtaaaagtgcgaaaacagtcggtgatgttattggtcaatatcatccacatggagactcctcagtgtacgaagcaatggtccgtttaagtcaagactggaagttacgacatgtcttaattgaaatgcatggtaataatggtagtatcgataatgatccgccagcggcaatgcgttacactgaagctaagttaagcttactagctgaagagttattacgtgatattaataaagagacagtttctttcattccaaactatgatgatacgacactcgaaccaatggtattgccatcaagatttcctaacttactagtgaatggttctacaggtatatctgcaggttacgcgacagatataccaccacataatttagctgaagtgattcaagcaacccttaaatatattgataatccggatattacagtcaatcaattaatgaaatatattaaaggtcctgattttccaactggtggtattattcaaggtattgatggtattaaaaaagcttatgaatcaggtaaaggtagaattatagttcgttctaaagttgaagaagaaactttacgcaatggacgtaaacagttaattattactgaaattccatatgaagtgaacaaaagtagcttagtaaaacgtatcgatgaattacgtgctgacaaaaaagtcgatggtatcgttgaagtacgtgatgaaactgatagaactggtttacgaatagcaattgaattgaaaaaagatgtgaacagtgaatcaatcaaaaattatctttataaaaactctgatttacagatttcatataatttcaacatggtcgctattagtgatggtcgtccaaaattgatgggtattcgtcaaattatagatagttatttgaatcaccaaattgaggttgttgcaaatagaacaaagtttgaattagataatgctgaaaaacgtatgcatatcgttgaaggtttgattaaagcgttgtcaattttagataaagtaatcgaattgattcgtagctctaaaaacaaacgtgacgctaaagaaaaccttatcgaagtatacgagttcacagaagaacaggctgaagcaattgtaatgttacagttatatcgtttaacaaatactgacatagttgcgcttgaaggtgaacataaagaacttgaagcattaatcaaacaattacgtcatattcttgataaccatgatgcattattgaatgtcataaaagaagaattgaatgaaattaaaaagaaattcaaatctgaacgactgtctttaattgaagcagaaattgaagaaattaaaattgacaaagaagttatggtgcctagtgaagaagttattttaagtatgacacgtcatggatatattaaacgtacttctattcgtagctttaatgctagcggtgttgaagatattggtttaaaagatggtgacagtttacttaaacatcaagaagtaaatacgcaagataccgtactagtatttacaaataaaggtcgttatctatttataccggttcataaattagcagatattcgttggaaagaattggggcaacatgtatcacaaatagttcctatcgaagaagatgaagtggttattaatgtctttaatgaaaaggactttaatacagatgcattttatgtttttgcgactcaaaatggcatgattaagaaaagtacagtgcctctatttaaaacaacgcgttttaataaacctttaattgctactaaagttaaagaaaatgatgatttgattagtgttatgcgctttgaaaaagatcaattaattaccgtcattactaataaaggtatgtcattaacgtataatacaagtgaactatcagataccggattaagggcagctggtgttaaatcaataaatcttaaagctgaagatttcgttgttatgacagaaggtgtttctgaaaataatactatattgatggccacacaacgcggctcgttaaaacgtattagttttaaaatcttacaagttgctaaaagagcacaacgtggaataactttattaaaagaattaaagaaaaatccacatcgtattgtagctgcacatgtagtgacaggtgaacatagtcaatatacattatattcaaaatcaaatgaagaacatggtttaattaatgatattcataaatctgaacaatatacaaatggctcattcattgtagatacagatgattttggtgaagtaatagacatgtatattagctaaaaactatatgcaatcacgaaattaaatgataaaatacagtaatgttaaattttgactaaattcaagggatttatattaaatgctgaccaagtacttatcgttaaattagcgatatactttgaccaaactaatataaatctcttgtattgtataagaaatgatgatgtatctctatatttactgaagtttcaattcggtctaattttatagaaggtacatgattcatgtagaggatgcgaggggtttattttgaaagatttcgatagtttaatacctggatggtttaaagaatttgtccatgttggtaccgatttaatatggtctcaatatttaattggtctattattgacagctggattcttctttacaattagttctaaattcgttcaattacgaatgttacctgaaatgtttagagctttagtagaacgtccagaaactttagaagatggtaagaagggtatttcgccattccaagcatttgcgattagtgctggttcgagagttggtactggtaatattgctggtgttgcgactgcgattgttttaggcggtccaggtgcagtattttggatgtgggttattgcatttataggtgcagcgagtgcatttatagaagcgactttggctcaggtttataaagtacatgataaagatggtggattccgtggtggtccagcttactatattactaaaggtttaaatcaaaaatggctaggtatcgtatttgcgattttaattacaattacatttgcatttgtatttaacacagtgcaatctaatacaattgcggagtcgttaaatacgcaatataatattagtccagtaatcacaggtattattttagcaatcgtaacagctattattatatttggtggtgtacgtagtattgctacgttatcttcgttaattgtaccgattatggctatcatttacattggtatggttttagtaatattgctatttaatttagatcaaattgttcctatgataggtacgattattaaaagtgcatttggtatcgaacaagtaactggtggcgctgtaggtgctgcggttcttcaaggtatcaaacgtggtttattctctaacgaagctggtatgggttctgcgccgaatgcagcggcaactgctgccgtaccacaccctgttaagcaaggtttaatccaatcattaggtgtgttctttgatacaatgttggtttgtacagcaactgcaatcatgattttactatattcaggactgaaatttggtgataacgcacctcaaggtgttgcagttactcaatcagcacttaatgagcatttaggttctgctggaggtattttcttaacaatagcagttacactgtttgcattttcatctgtggtaggtaattactattacggtcaatctaatattgaatttttatcaacaaaccgtgtaatattatttatctttagatgtcttgttgtagtacttgtctttgtcggtgcagttgtaaaaacagaaacagtatggaatacggcagacttatttatgggcttaatggcaattgtaaacattatttccattataggactgtccaatgtagcttttgcattgatgaaagattatcaaaagcagaaaaaagaaggcaagaaccctgtctttaaacctgaaaacttagaaattaacttatttggaattagtgcttggggcgctaacaaatataagaactctgataaataaatatttttaatgtaacgattcattatataaaaatcaaataaaccctgaggttttcaaattaaagcgaaaatctcagggttttaaatttgtactcaataatcatctgtatcattacactagttaatctaagatttgattatatattaatatagtaaggttgagatttatttcctccattggtgtgcaaagactataccattgataagacatattgttggatagatgaatataaatttattttagctttgcacaatttaatagtacgttttagtttgtattgagtattaattcagataatatataaataaatagaattatttgtaaatatgggagtcagatttttttattatagttattccactttgagagacatcgaaattaaattaagatatatcatataggataggcgtgtaatagaacacaagtatttaaattattatactttcaagttagacatttccgatatataatcttaataatagaaaaataggtgatgataatgggagaatatattgttactaaaacattgaacaacaatgtcgtagtatgtactaataatgatcaagaagttattttaatcggtaaaggtattggttttaacaaaaaagagggaatggcgttaaacgaccaaactattacaatagagaaaatttataaattagaaagtgagcaacaaaaagcacattataaaagtttagttgaaatcgctgatgataatgtattacaagtaattattgattcgttgaattttatttctaatactgcgatgaatgttgattcaaaacaacttgtagtttcattaacggatcatattatatttgcttataaacgcttaaaacaaaatcaagttattagcaatccatttgttatggaaactatgcagttatatagtgatgcatatcatattgctaaacaggtgattgatcagttaaatgcagcattagatgtacattttcctgaagatgagataggatttattgcattacatattgcatctaatacagaagatttatctatgcatgagatgaccttgatcaataatgttattaaaaaaggtatagatatcattgaatcagaccttgtgacaactgttgataaggaatcattacaataccaacgttttataagacacgtacaatttttaattcgccgattaagaagaaaagaatatatacatgcacaagatgattttgtgtctatgattaaaaatcactatccgatttgctataacacagcatataaaattttaactatgatacaaaaacaatttgatgttaatatcagtgagtctgaaattatatatttaacattacacattcatcattttgaagaaaggattaatcaatcctaaattaagtgtattacacgggcatttcgttactgtaaagggtatttgtatggtatcattgatgttagtaattttacataagtggactgtttttatacaacatcttatgaatattttaagtggtggtgaatctataattgaatgaaaatgaaaagaatataagaaagaattttttaaaatttaccgaatcacggtatatgaagtttgttggtgggaatgatttagtcttctcattaatagcgctagtattgttgggtattgttatttttattttcgaaaaagtatcatatgtttttgatccttttatcatcgtttttaagacgatagcagcacctatcatcgtctctttaattctattctatctatttaacccaatcgtaaatatgatggaacgttatagaataccaagagttgcaggtatttctattatttatctagctgtagtaggtgttattacgttaattgttaatttattgatacctattattggttcgcaagtagatagtttagttaaaaattcaccgcaatatctagaaaaattaattaattctattgataaaatagcaaataatacgtttttctcttcgtattatagtcaaattaatgattggttaaattctttacctaagaaaataccatctatgttaagtgaatttacagatggctttgggtctaaaattgcaacgtttgcagaaacgattgctaatattggcgttgtgattgtcacaacaccatttgtactattctttatgcttaaagatggacatcacttcaaagaattttcaacgaatattatgccaccgaaattccgaaaagattttcatgatctacttgaaaaaatgagtgttcaagttggttcatacattcaaggacaaattatcgtttcattctgtatcggtatactgttgtttatcggttattcggttatcgggttgaaatatagcttagtattagctagtattgcggcagttacaagtgttgtaccatatttagggcctactatagcgatttctccagctattgtaatagctgctataacatcgccgtggatgctcttaaaattagcagtagtatggactttagtacaatttgttgaagggcacttcatttcaccaaatattatgggtaaaacacttaagattcatccacttacaatcattttcattttactgtgtgcaggcaaattgcttggtattgtaggcgttattttaggtattccgggatatgctattttaaaagtattagttactcatttattccaattatttaaacgtcgatacaatcgtttctatggtaatgatgtaggtgaatatgatattaaagaaagtaataaaatagttgaataagtaataaaaaataccaatgactatatgtttgttggtattttttatggtgcttataatgttgggcagttacatttatgattatcagcacatgtttagcttataaatttttacgaaagtttagccgtttataaagcacatgcataatgaaacgagtatttgccacttgattagtacttcattattatgtcgaaaataaaaataagtggtatttttaatatattaagaagcactcataatcggctgttaattaataatatttttcataagtattgattcatcattttctttatgttaaatatgaatcagtatagataaccatattgttctgtttgagatagaaatattttctatttacttcttaatacagatatcaatatgacaaaagtgttatataaatcaaaggtaaatgatatgctatttttatggtttatatgatatattttgatttataacagaaataattagaattgatgtgaaaaaatgaatcaggaagttaaaaacaaaatattttcaatcttaaaaattacgtttgctacagctttatttatttttgtagcaatcacattgtatcgggagttatctggtattaactttaaagatacgttggttgaatttagtaagattaaccgtatgtccttagtgttactatttattggtggtggggcatcgcttgttattctatcaatgtatgatgtgattttatctagagctttaaaaatggatatatccttaggcaaagttttaagagtaagttatatcatcaatgcattgaatgcgattgtaggtttcggtggctttattggtgcaggcgttagagcaatggtttataaaaactatacgcatgataaaaagaaattagttcactttatatccttaatacttatttcaatgttgacaggtttaagcttattatcattgctaattgtattccatgttttcgatgcatctttaatcttagataagattacatgggtaagatgggtattatatgtagtgtcatttttcttaccattattcattatttattcaatggttagaccacccgataaaaacaatcgttttgtaggattgtactgcactttagtgtcgtgtgttgaatggttagcagctgcagttgtattatatttctgtggtgtaattgttgacgctcatgtatcattcatgtcctttattgcaatatttatcattgctgcattatcaggtttagtcagctttattcctggtggtttcggcgctttcgatttagttgtattactaggatttaaaactttaggtgtccctgaggaaaaagtattattaatgctacttctatatcgttttgcgtactattttgtaccggtaattattgcattaattttatcatcatttgaatttggtacatcagctaagaagtacattgagggatctaaatactttattcctgctaaagatgttacgtcatttttaatgtcttatcaaaaggatattattgctaaaatcccatcattgtcattagcaattttagtattctttacaagtatgatcttttttgtaaataacttaacgattgtttacgatgctttatatgatggaaatcacttaacgtattatattctattggcaattcatactagtgcttgtttattacttttactgaatgtagttggtatttataagcaaagtagacgtgccattatctttgctatgatttcaattttattaatcacagtggcgacattcttcacttacgcttcatatattttaataacatggttagctattatttttgttctgcttattgtagctttccgtagagcacgtaggttgaaacgcccagtaagaatgagaaatataattgcaatgcttttattcagtttatttattttatatgttaaccatatatttattgctggaacgttatatgcattagatatttatacgattgaaatgcatacatctgtattgcgctattacttctggcttacgattttaatcatcgctatcatcataggtatgattgcatggttgtttgattatcaatttagcaaagtacgtatttcttctgaaattgaagattgcgaggagattattaatcagtacggcggtaattatttgagtcacttgatatatagtggtgacaagcagtttttcactaatgaaaataaaacagcatttttaatgtatcgttataaagcaagttcattagtggttcttggagatccgttaggtgatgaaaatgcctttgatgaattgttagaagcattctataattacgctgagtatttaggctatgatgttatattctatcaagttacagatcaacacatgcctttatatcataatttcggtaaccaatttttcaaattaggtgaagaagcaattattgatttaacgcaattttcaacttcaggtaaaaaacgccgtggatttagagcgactttaaacaaattcgatgaacttaatatttcattcgaaattattgaaccaccgttttcaactgaatttataaatgagcttcaacatgtaagtgatttatggctagataatcgtcaggaaatgcatttctctgtgggtcaatttaatgaagaatacttatctaaagcgccaattggtgtaatgcgaaatgaagaaaatgaagtaattgcattctgtagtttaatgccaacatactttaatgatgccatttcagtcgatttaattagatggttgccagagttagatttaccattaatggatggattatacttgcacatgttactttggagtaaagaacaaggttatacaaaatttaatatgggtatggcaacgttatcaaacgttggtcaattgcattattcatatttaagagaacgacttgcaggccgtgtctttgaacatttcaacggtctatatcgtttccaaggattacgtcgttataaatctaaatataatccgaattgggaaccacgctttttagtttatcgtaaagataattcgctttgggaatcactttctaaagtaatgcgtgtaatacgtcacaaataattaaaatccaagtgctaagaggtatacagttatgcctgaagcgcttggattttttggtttctataaagaatgatttataaaaaacggtacagataagaatatttaagtttcctatctgtaccgtattttaatattgaaatgagcttaagttaagtcgcctaacttttattatcagtccaatcagtttcatcaagtataaatgttattgcttatttttgtattcttggcgtattttttgttcttctgcatagcgctctggatttttcttataaaaatcttggtgatagtcttcggctttgtaaaattgtgacgcgggtaatatttttgttgcaattgccttatcagcattaatcgtatttttaagctgctcgatataagtctcagcgagttctttttgatgatcattagtgtagaaaatagctgtttgatattgaggaccacggtcttgatattgaccacctgtatctaatgggtcaatgactgagaaaaatatttctaataacttattgtatgagaataatgcaacatcatattgaatttcaacagtttctaaatgaccactcgtacctgattttacttgttcgtaagtaggattttcaatatgtccgcccatatatccagaagttactttttctatgccgtcaaaggtgtcaaatggtttcgtcatacaccaaaagcaacctccggcaaaataagctgtattaatattcatttttgacatcctttcattagaccttagtacgatttattaagaaatcacttgctttttgaattgtttttatataacgttaatatgtgattattatagtacacaaaaatctatttttgaagatataaggtaggtaaatatggataaagaaactaatgacaacgaatatagacgtcaaagtgaacatcgcacttcggcgcctaagcgaaaaaagaagaagaaaattaggaaattacctatcattcttctgattgttgtaattttacttatcgcattagttgtatatattgtacatagttacaatagcggtgtagaatattccaagaaacatgcgaaagatgttaaagtacatcaatttaatggaccagtaaaaaatgatggtaaaatttctattcttgtactcggtgcagataaagcacaaggtggacaatcaagaacagattctatcatggttgttcaatatgactttatcaataaaaaaatgaaaatgatgtctgtcatgcgtgatatttatgcagatattccaggatatggaaaacacaaaattaattcagcatacgctttaggtggtccagagctacttagaaaaacacttgataaaaatttaggaattaatcctgaatattatgcagtagttgattttactggatttgagaaaatgattgatgaattaatgcctgaaggtgtaccaattaatgtcgaaaaagatatgtcgaaaaatattggtgtatctttgaaaaagggtaaccataggttgaatggtaaagaattacttggttatgcaagattccgtcacgaccctgaaggtgacttcggacgtgtgcgacgtcagcaacaagtgatgcaaacattgaaaaaagaaatggttaattttagaacagttgttaaattaccaaaagttgcaggtattttaagaggctatgtgaatacaaacattcctgattcagggattttccaaacaggtttgagttttggtatccgaggtgaaaaagatgttaagtcattgactgtgccaatcaagaactcatacgaagatgtcaatacaaatactgatggtagtgcattacagattaataaaaacacaaataaacaagctattaaagactttttagatgaagattaaaaataaacaaggcgatttctatcatactcagatagaagtcgccttgttcgttttcaaagaattaattggcatgcatcttatgaagaattattgatctgactttcttacgccagccacaccataatggtttggtttcatttcttctataacaacgtgaattgcttgtctatttgcccccgttgttttttctacggcgtcagttacttcgctaactaaattttttaattgttcatccgaacgaccttctaataattttacattgacgattggcatcatccaaacctcctaatcattattaatttgagtatatcatgtaatacttaaaaattcatttgcaaaataacagaacatttgttctaaaatagttgaaatagaacacgtgttcgtatataataagattcaagtaagggaggaataacagtgtataattatcatttattagaagatagggatgttctatgtattgaccaaaaaagtttttttgcgagtgtttcttgtattgaaaaggggctagatccattagaaacaaagttagctgttgttgcagatactaagcgtcagggttctgtaatattggctgcgacacctaaattaaaagaattaggcatcaagacagggtcgcgattgtttgaaataccacatagaaatgatatttacattatcaatccaagtatgcgtaaatatcttaatgtttcagttgctatttctaagattgcattgcgttatattccacctgaagatttacaccaatatagtattgacgaattttttatggatgttactgatagctatcatagatttagttctacagtacatgcattttgcgaaagacttaaacgtgaaatttatgaagaaacaggcatttattgtactgtgggcattggttctaatatgttattaagtaaaattgctatggatgttgaagcgaagcatagtcaaaatggtatagctgaatggcgatatcaagatgtaccaacgaaattatggccaattcagcccttgcgagatttttggggtattaatcgtcgaacagaagccaaattgaataaaagaggaatttttactataggagatttagcgaaatatccatataaatttttaaaaaaagagttcggtattttaggtgttgatatgcatctacatgcgaatgggatagatcagagtaaagtacgtgaaaagcacaagatcagcaatccatcgatatgcaaaagtcaaatattaatgagagattatcattttgatgaagcaaaagtagtaatgcaagagttaattgaagatgttgctagcagagttcgagcaagaaaaaaagtggcaagaacgatacattttgcctttggctatagtgatgaaggcggtgtacataagcaatatactttgaaagatccaacaaacttagaaaaagatatttataaagtagtaatgcattttgcagataaattatgtaataaacaagcactatatcgtacgctaagtatatctttgagtcaatttattaatgaggatgagcgacagttaagtctgtttgaagatgaataccaacgcaaacgtgacgaatgcctagctaaaacgatagaccaattacatttgaaatacggcaaaggtattgtgtccaaagcagtatcgtttacagaagcaggtacaaaacatggtagattaggtttaatggctggacataaaatgtaatgactatacggtttaaggaatatataactgtgattcgtataaaataagtctctaaagataaatatttcatatatcacaatagatttcacaataatatctaagaatacatgggaatttatcaaaagagacttaataattattggatataacaatcaaaatcactcaatgcttgcataccgcgttctcggtcagtaggatttttgaaactaatttttaaagcaccgtatatatcttcgcgtacttctaagattcttaagttgcttatagatatgttatgtaaactcaggatataagtcactttacttatcatacctgattcatccggaatatctacatatagatcatacgcagtatttagtccacctagttgtttagcgggtagtgcgtcgcgatacgatttagcttgggcaaaaaatgataacaatttttcagaatcattgctttcaattagtctttctaaatcttgaaactgactttttagctgtcgaatcatttctaaaatatacgttttattactcaaggtgatatctttccacatttgtgcattactactagctatacgagtgatatcacgaaaaccaccagctgcaagtttattaactaaatgatgttcttgaccgttcttttgactaacatgaactaaactagatgcaacgatatgaggtaaatgacttacgacgcttgttacgtagtcgtgttcttcagcagtagttacaataaatttagcaagagtaggtgataacagttcttttaacgtgtttgctgcttgctcatttcttggctcattatagactaaaatataataagcgttttcaaataagtgctttttagcatttagtacaccagatttatgactaccagccattggatgaccactgactaaatgaatattatgctttaataaattggattcgtgttgctgtatcattgctttagtactaccagtatcagaaacaataacaccaggtttagttggcatatctataagctcgctaagatatttatttgtgatagcaacaggtgttgcataaataattacatcggcttttttaatagcttcactataatttaaacatttttcattaataatgccgattgatttagctttatctaactgagaagtatctgcatcgtatgcaataatattagtattagggttatggtattttatattgctagcaagacttccaccaattaatccaagcccaacaaataaaactgttgtcatataaatcaccttatttcgaaattttcagaataataacattgtaaatgagctgttgacacagtgcaatagtaaataaaaatcgataatagcattaatagataaacggagataaatcatctacaataaagagtatagtaacacaatggcaacggaggggtaaatcaatggaaccaatattagaaatgattaaaacattaacaggtattaatagtccttcaggagacacagaagaagcaattcaatttgtcgaaaaatatgcaaatgacttgggttatcaaacaacactaacaaataaaggtgcgttattaataacagtgccaggcaaaaatgatgaagtacaacgctgtattactgctcatgttgatactttaggtgcaatggttaaagaaattaaagaagatggtcgcttagcaatagaattaattggaggattcacgtataacgcgattgagggtgaatattgccaaattaaaactgatgctggtcaaatatatacaggaacaatttgtctgcatgaaacaagtgttcatgtatatagaaataatcatgaaatacctagagatcaaaagcatatggaaataagaattgatgaagtaactacatcagaagaagatacaaagagtttaggtatttcagtaggtgattttgttagctttgatccacgtacagttatcacgtcatcaggttttattaaatctcgtcatttagatgataaagctagcgtagcgatgatactacaattactaaagaaattaaaagaagagcaaataatattaccacatacaacgcaattttatatttctaataacgaagaaataggttacggtgcaaatgcatcaattgattcgaaaatcaaagaatatattgcattagatatgggcgcgttgggagacggtcaagcatcggatgaatatacagtttctatttgtgccaaagatgcttcaggtccatatcataagcaattgaaatcgcacctagttaatctttgcaaaataaataacattccatataaagtagacatatatccatattatggttcagatgcttcagcagctttacatgctggtgcggatatcagacatggtttatttggcgctggcattgaatcatctcatgcaatggaacgaacacatattgattctattaaagcgacagagaaattactatatgcatattgcttatcaccaattgagtaaacaattagtgttgacaaatgtgaacgacctatgtaatataatgaactataaaaataattagaattttctaaagaaatagtagcagatatgaaacgtagcaaatagaaagctaatgggtgatgggaattagcacgccatatcttgtgaattggactttggaaaacaattgaatgagttttgaaagtgaacatgaattatgttaactaaggtggcaccacggtaacgcgtccttacaggtatatgcgttatgtggtgtctttttatttagacaaaatgtagtagttaattaaaggtagcaacagaaagttagtggatgatgtgaactaacaccgagattaatgaaattgggttttgtctgcaacagaaaaattatatatagtaaagagtgaactatgaatatttcgaatattcggttaatttaggtggtaccacgcgtcagcgtcctttatattgataaggatgctggcgcttttttgaaaggagcgtatagaatggatatattttataaaaaaataaaagcaaatgtaacgcccgaagttttagcacaacttcattccaagaagatcattttggaaagtacaaatcaacaacaaactaaaggtcgctattcagttgttatttttgatatttatggcactttaactttagataatgatgtattatcagtaagtactttaaaagaatcgtatcaaatcactgaaagaccgtaccattatttaacgactaaaataaatgaagactaccataatattcaagatgagcaacttaagtcattaccatttatatctggatatgttgggacgtgtagctttgatttagtaagacatgaatttcctaaattgcaatcaatacaattagaagatcacaagcagcacgatgtaaggttatatatggttgaacaagtttatgtatttgaccattacaaagatgagttatatatcatcgcgacgaatcaattttcaaattcaacaaaatcagatcttgagaatcgagttattaagtctatcgaagacttaactaaaatccaaccattcatgcctacacaagattttgattttaaaactaaagaaattcaatcaaacatttctgaagaaagatttatcgaaatgattcagtatttcaaagagaaaataacagaaggggatatgttccaagttgtgccatcaagaatttacaaatatgcgcatcatgctagtcagcatttaaatcaactttcgtttcaactgtatcaaaatttaaaacgacaaaacccaagtccatatatgtattatcttaatatcgatcaaccatatattgtcggtagttctcccgaaagtttcgtaagtgtcaaagatcaaattgtaacaactaatcctattgcaggtacgattcaacgtggtgagacgacacaaatagataatgagaatatgaaacaactacttaatgatccaaaagaatgcagcgaacatcgtatgctagttgatttaggacgtaatgatattcatagagtaagtaaaatcggtacctcaaaaattactaaattaatggttattgaaaaatatgaacatgttatgcatatcgtaagtgaagtcacaggtaaaataaatcaaaatttatcgccaatgacagttattgcgaatttattaccaacaggtaccgtttcaggtgcaccaaaattacgtgcaattgaaagaatatatgaacaatatccacataaacggggcgtttatagtggtggtgttggatacataaattgtaatcataacttagattttgcattagcaattcgaacgatgatgatagatgagcagtatatcaacgtagaagctggttgtggcgttgtatatgattctattcctgaaaaagaactgaatgaaacgaaattgaaagctaaaagcttattggaggtgagcccatgatcttagttgtagataattatgattcctttacatataacctagtggatattgttgctcaacatactgacgtcattgttcaataccctgatgatgataatgtgctgaatcaatcggtggacgctgttattatatctcctggtccagggcatccattagacgatcaacagttaatgaaaatcatatcaacctatcaacacaaacccattttaggtatttgtttaggggctcaggcactgacttgttactacggtggagaagtcattaaaggcgacaaggttatgcacggcaaagttgatacactaaaggttatatcgcatcatcaacatctgttatatcaagatataccagaacagttttcaattatgagatatcattcattaataagtaaccctgacaattttccagaagaattgaaaattactggacgtaccaaagattgtatacagtcattcgagcataaagaaagaccgcattatggtattcagtaccatcctgaatcatttgctacagactatggtgtcaaaataattacaaatttcattaatctagtgaaggaaggatgaaaaccatgacattactaacaagaataaaaactgaaactatattacttgaaagcgacattaaagagctaatcgatatacttatttctcctagtattggaactgatattaaatatgaattacttagttcctattcggagcgagaaatccaacaacaagaattaacatatattgtacgtagcttaattaatacaatgtatccacatcaaccatgttatgaaggggctatgtgtgtgtgcggcacaggtggtgacaagtcaaatagtttcaacatttcaacgactgttgcttttgttgtagcaagtgctggcgtaaaagttataaaacatggtaataaaagtattacctcaaattcaggtagtacggatttgttaaatcaaatgaacatacaaacaacaactgttgatgatacacctaaccaattaaatgaaaaagaccttgtattcattggtgcaactgaatcatatccaatcatgaagtatatgcaaccagttagaaaaatgattggaaagcctacaatattaaaccttgtgggtccattaattaatccatatcacttaacgtatcaaatggtaggcgtctttgatcctacaaagttaaagttagttgctaaaacgattaaagatttaggtagaaaacgtgcaatcgttttacatggtgcaaatgctatggatgaagcaacactatctggtgataatttgatatatgaattgactgaagatggagaaatcaaaaattacacattaaatgcgactgattatggtttgaaacatgcgccgaatagtgattttaaaggcggttcacctgaagaaaatttagcaatctcccttaatatcttgaatggtaaagatcagtcaagtcgacgtgatgttgtcttactaaatgcgggtttaagcctttatgttgcagagaaagtggataccatcgcagaaggcatagaacttgcaactacattgattgataatggtgaagcattggaaaaataccatcaaatgagaggtgaataatatgacgattttatcagaaattgttaaatataaacagtcacttttacaaaatggctattatcaagacaaacttaataccttgaaaagtgtgaagattcagaataaaaaatcttttataaacgcaattgagaaagaaccaaagctagcaattattgcagaaattaaatcgaagagtcctacagttaatgacttacctgaacgagatttatcgcaacaaatctcagattatgaccaatatggtgcaaatgccgtgtccattttaactgatgaaaagtactttggtggtagttttgaaagattacaagcattgacgacaaaaacaacattacccgtattatgcaaagactttattatagacccgcttcaaattgatgttgctaaacaagctggtgcatctatgattttattgatcgttaacatcttatctgataaacaattgaaagatttatataactacgctatatcgcaaaatctagaagtgttagttgaagtacatgatcgccatgaattagaacgtgcctataaggttaatgctaaattgattggtgtaaataacagggacttaaaacgatttgttacaaatgtggaacatacaaatactattttagaaaataaaaaaccaaatcattattatatttctgaaagtggtattcacgatgcatctgatgtaagaaaaatcttgcatagtggtatcgatggcttactaataggtgaggcgcttatgcgttgtgacaatctatctgaatttttaccacaactgaaaatgcaaaaggtgaagtcatgatgaaattgaaattttgtggctttacatcaataaaggatgttacagcggccagtcaattacctattgatgcgataggtttcatccattatgaaaaaagtaaaaggcatcaaacaattacccaaataaaaaagttagcgtctgctgttccaaatcatatcgataaagtatgtgtcatggtaaatcctgatttaacaacaattgaacacgtattaagcaatacgtcaattaacacaatacagttacacggcacagaatctattgattttatacaggaaattaaaaagaaatattcaagcattaaaatcactaaagctttagctgcagatgacaacataatccaaaacataaataaatataaagagttcgtagatttatttattatcgacacaccctcagtgtcgtatggtggtaccggtcaaacatatgactggactattttgaagcacataaaagacataccttacttgatagcaggaggcattaactctgaaaatattcaaacagttaatcaacttaaattatcacatcaaggttttgatcttgcatcaggtatagaagtaaatgggcgaaaagatatagaaaaaatgacagcaattgtaaatattgtgaaaggagatagagataatgaataaacaaatacaaacggaagcagatgaattaggtttctttggtgaatacggagggcaatatgttccagaaacattaatgccagcaattattgagttgaaaaaagcttataaagaggcaaaagcagacccagagtttcaaagagaactggaatactatttatcagagtatgtaggacgcgcgacgccacttacatatgctgcatcatatactgaaagcctaggtggcgctaaaatatatttgaaacgagaggatctaaatcatacaggcgcccataaaattaataatgcgttaggtcaagcgttgcttgctaaaagaatgggcaagaagaagcttgttgctgaaactggtgcgggccaacatggtgtagctagtgctacggttgctgcattatttgatatggaacttgttgtctttatgggaagtgaagatattaaaagacaacaacttaatgtatttagaatggaattacttggtgcaaaggttgtggcagttgaagatggtcaagggactttatcggatgcagttaataaagcattgcaatattgggtaagtcatgtagatgatacacattatttattaggttctgcattaggtccagacccgttcccaacgattgttagagattttcagagtgtgattggtaaagaaataaaatcacagatattgaagaaagaaggtcgacttccggatgcaattgtagcatgtatcggtggtggctcaaatgcaatcggtacattttatccatttattaaagatgatgttgcattatacggtgttgaagccgcaggtcaaggcgaggatactgataaacatgcacttgcaattggcaaaggatcacctggcgtattacatggtactaaaatgtatttaattcaagatgaagatgggcaagtgcaactagcacattctatttcagcaggacttgattatcctggtattggaccagaacattcttattaccacgacattggtagagtaacttttgaaaatgcaagtgatacacaagcaatgaatgctttaatcaactttacaaaacatgaaggtattatacctgcaattgaaagtgcacatgcactgagttatgttgaaagactagcgcctacgatgtcgaaagaagatattattgtagtaactatttctggacgtggcgataaagatatggaaacaattagacaatatatggcagagcgaggtcttgcaaatgactaaattatttataccttatattatgggcaataaagatttgattgaaaatgcaacattgttgagtgaaaatggtgcagatataattgaaattggagtacctttctctgatccggttgctgatggtccagttatcatggaagcaggtcaacaagcgattaaacaaggcatcacgatagattatattttcaatcaattagaaaaacatggtgatcaaattaagtgtaactatgtattaatgacgtattataatattatttgtcattatggagaacaagcgttttttgaaaaatgtcgagatactggtgtctacggcttaattattcctgatttaccatatgaattatcgcaaagtttaaaacaacaatttagtcactatggcgtcaaaatcatatcgttagttgcgatgactactgatgacaaacgtataaaagatatcgtatcccatgcggaaggctttatttatactgtgacgatgaatgcgacaacagggcaaaacggtgcgtttcatccagaattaaaacgaaaaattgagtcaattaaagcgatagccaatgtgccagttgtcgcaggatttggtataagaacaccacaacatgttgcagatataaaagaggttgcagatggcattgtcattggtagcgaaatcgttaagcgatttaaatctaacacgcgtgaggaaatcattaaatatttacaatctatccaacaaacattgaataattaagtttacttgatttaaaaaaattagtcgaatactgtttgaaaaagtgaaaaacggtgaattgtaaaattgaatagaaatgatacaaaagtaatatgagcaaacccaaacgttcatattacttttttgaaattgtatgcaaaaatctaaatattactataaaagtatacgcaattaaagcgtttatgttttagttttaacattaactattgtatacttatttagattagatttattatttttgacatttgcagaggggaaatagaaaaactgcaaatacggaaatgaaattaattaacgagagacaaataggagtaatgataatgaagtttacaaatttaacagctaaagagtttggtgcctttacagatagcatgccatacagtcatttcacgcaaactgttggccactatgagttaaaacttgctgaaggttatgaaacacatttagtgggaataaaaaacaataataacgaggttattgcagcttgcttacttactgctgtacctgttatgaaagtgttcaagtatttttattcaaatcgcggtccagtgatcgattatgaaaatcaagaactcgtacactttttctttaatgaattatcaaaatatgttaaaaaacatcgttgtctatacctacatatcgatccatatttaccatatcaatacttgaatcatgatggcgagattacaggtaatgctggtaatgattggttctttgataaaatgagtaacttaggatttgaacatactggattccataaagggtttgatcctgtgctacaaattcgttatcactcagtgttagatttaaaagataaaacagcagatgacatcattaaaaatatggatggacttagaaaaagaaacacgaaaaaagttaaaaagaatggtgttaaagtaagatatttatctgaagaagaactgccaatttttagatcatttatggaagatacgtcagaatcaaaagctttcgctgatcgtgatgacaaattttactacaatcgcttaaaatactacaaagatcgtgtgttagtacctttagcgtatatcaattttgatgaatatattaaagaactaaatgaagagcgtgatattttaaataaagatttaaataaagcattaaaggatattgaaaaacgtcctgaaaacaaaaaagcgcataacaagcgagataacttacaacaacaacttgatgcaaatgagcaaaagattgaagaaggtaaacgtctacaagaagaacatggtaatgaattacctatctctgctggtttcttctttatcaatccatttgaagttgtttattatgctggtggtacatcaaatgcattccgtcattttgccggaagttatgcagtgcaatgggaaatgattaattatgcattaaatcatggcattgaccgttataatttctatggtgttagtggtaaatttacagaagatgctgaagatgctggtgtagttaaattcaaaaaaggttacaatgctgaaattattgaatatgttggtgactttattaaaccaattaataaacctgtttacgcagcatataccgcacttaaaaaagttaaagacagaattttttaggaagggaattatcaaaacatgaaatttacagagttaactgttaccgaatttgacaactttgtacaaaatccatcattggaaagtcattatttccaagtaaaagaaaatatagttacccgtgagaatgatggctttgaagtagttttattaggtattaaagacgacaataacaaagtaattgcagcaagccttttctctaaaattcctactatgggaagttatgtttactattcgaatcgtggtccagtaatggatttttcagatttaggattagttgattattatttaaaagagttagataaatatttacagcaacatcaatgtttatatgttaaattagatccgtattggttatatcatctatatgataaagatatcgtgccatttgaaggtcgcgagaaaaatgatgccttagtaaacttgtttaaatcacatggttacgagcatcatggctttacaactgagtatgatacatcgagccaagtacgatggatgggcgtattaaaccttgaaggtaaaacacccgaaacattgaaaaagacatttgatagtcaacgtaaacgtaatattaataaagcgataaactatggtgttaaagtcagattccttgaacgtgatgagttcaatcttttcttagatttatatcgtgaaactgaagagcgtgctggatttgtatcaaaaacagatgattatttttataactttattgacacatatggagataaagtattagtaccattagcatatattgaccttgatgaatatgtgttaaagttgcaacaggaattgaatgacaaagaaaatcgtcgtgatcaaatgatggcgaaagaaaacaaatcagataaacaaatgaagaaaattgcagaattagataagcaaattgatcatgatcagcatgaattattgaatgcaagtgaattgagcaaaacggacggcccaattctaaaccttgcttctggcgtttattttgcaaatgcatatgaagtgaattatttctctggtggttcatcagaaaaatataatcaatttatgggaccatacatgatgcattggtttatgattaactattgcttcgataatggctatgatcgttataatttctatggtttatcaggtgattttacggaaaacagtgaagattatggcgtataccgctttaaacgtggatttaatgtacaaatcgaagaattaataggggatttctataaaccaattcataaagtgaaatattggttgttcacaacattggataaattacgtaaaaaattaaagaaatagatgtaaatgatgttagggcttatagttattgatactataggctcttttttatgctttttttagcgaaattttaattatttcacactaagaaaaactagtatgtatttgtcaatctaatgtttttcattataatgatgttttattgatttagttttatgattaaaagattatgcaaaacataaaatatatagcgtcatatttgagttttaatgataatatttttataatatataatataaaataatggttatctgagtatgaaatgcaagtaagtgaggtagttaaaaaatgaatcgaattgaaaaacatgccaaaaacacttttattattctgatgctcattatgttattttggatttttatgagttttattttccagaaattattatttccaccttcgaaaaataatttaactacatatgaagcattaaaatattatacacatttaaagggatattacggtttggatcatatatcaaaaggaatagcatacattgcctgtgtgttaattccattcaatttcttttttagattcaatgacatcaaaaaagataataactataataatattataagtacgttattcctattattatactttttagttaatggaatttcgttgattattcaaggattcactgcagaatttacaattagtttaattagtgagtcaaatattcataataatcatgaatttgctgtgaacttatttagatatgtcatacaagaaggtggtatttcttttagtacatatctagtgtgtaacttttctataataatgtggttattcttttcgtgttctttattaaaagaacgaaaaccagttgtcagatgtttaccattaattatatcttgtttaaaattaatattaatcctactatttttactttcaatacttttggtcatatatcaaactcaatctgcacaaatcttatttatttttatagattttctaaattttgtcgcgttaattttagtttatttatgtactaatcctaataatagaggtattgataaaatagcatgtgttaaataaaaagttaatagtaactacaaacatactttactaataatcaaaacgacttatacaaactcgaagttatataagtccccttatggaatttcacattctagtttacataatatatattataggaagttatatgtgtgtgacgcaaaaggtaccctacatcataatcattatctaatatcgccgcataacttacttatgctataatcatgatattatattgtttggagtgatttgatgagatttgtctttgatattgacggtacgctttgttttgacggccgattaattgaccagactattattgatacattgttacagttacaacatgctggtcatgaacttatatttgcatcagcacgtccgattcgtgatttgttgccagttttaccatcagtatttcatcagcacacattaattggcgcaaatggtgctatgatttcacagcaatcaaagatttctgttatcaaaccaattcatactgatacataccaccatatcttaaaaataattcaaaagtatgagttagattatattattgatgatgattggaattatgctgcacaacttgacgctgagaacgcgatttttgagcgtttagatccacataagctggccagttgtattgatgttgcaaatatcgacacgccaatcaagattattttattaaatatagacccggcacaaattacaactatattagacgagctagataaataccatcaagaattggaaatgattcaccattcaaatgagtataacattgatataacagcgcaaaatattaacaaatatactgcattacaatatatatttgatgcagatgttaaatatatagcatttggtaatgaccacaatgatattgtcatgttacaacatgctagtagtggctatattataggaccatcagaagcatacacacacgcaatattgaaacttgataaaatcaaacacatcaataataatgcacaagctatttacaaagtcttaaaatcatataaataaaaacacccctatcaaatgataatcattatcaatcgataggggctattttaataaaattcgtcctcgaacatttcttcctcttcatctaatccaaataattctgccatttctccatgttcaattaacatgtttaaatatgcatcgcggagttcttcttcactcatatcattaatcatttctttaagactatcaatccacatatttctgcgtaattgatagtcttcttcaacttcgtttaacatcattatatgtttatttgctgcttctggactagctgtaaagagtaatgcaatcatatgtttacatatcactcgtcttccatcagcatgaggacaattacatatggattttctaggatgttccatatcaatataacaacgatatactttgttgccactgccctttacttcagcctcatgctgcgtttctgaaaatgattttaagttaatgacgcattcactttgataataattaaagcctctttctatagaacgaatacttgcaatatcaagtaatcccattaatgatactcctttttattattatttttaaataaagaaaataaaatagataagtgtctagattaaaatacttgatttatctatattttataacaagtctagaattatcgcattcttaaataactaatatgaaaatgcttgcactaattcttttgtataagggtgtctatcaacattaaataattcctctattgcaaaatcatcgactatcatgccatccttaagaacgataattctattaactaagcgttgtaacacggataaatcatgagaaataacgataaaatgatttaagttcgtaatcgtttgcgcttttaatatatttattacattttgttcagctataacatctaaatttgaagttatctcatcacatattaaaacgcgaggctgtgctaataacgaacgcatgacattaaatctttgtaattgtccgccactcacttcgcttggtaatttagtcaataattgcgcgttcaactcaaaagtagataaatgttgtaataataattgatcctgagcagtattatcagttaggcctctgtaataatataacgcttcttttaatgaggtctcaatcgtccaatcagggttaaagctagttaaagggtgttggaaaatcggtaacacagcattgtcacttaagtaaatttctcctttaacaggtttaaacaagccaagaaccaatgaagcgagcgtacttttaccacagccactttcgcctaaaataccaacattttctccatcgggtatagtaatattgatatcttgtagcaccatctgctttttattataaccaaaagtcacatgttttaactcaatcatagtaatccctctttaattgtgttctatatttaattagacgttcagtatacggatgcaaatgctcatacttgaaatgattaatattgcctcgttcaatgatttgaccttcttttaaaacataaatgtactgacaatatttcaatacatgacttaagttatgtgtgataataaataatgtttgaccatgttctaatacaatatgctgtaataaatccatcacttgattaccgttcaaagcatccaatgatgcaactggttcgtctgcaatgattaatttaggctccaacatgagaacgcttgctatgtatacgcgttcaagttggcccccagaaagttggaaactatatttatttaatatatctttgctttgtaaattaacccacgacaaagccttatcaattttggacaaagcctcttctttactacttttataatgcttacgataaatcgcagttaactgtttacctaatttagtatggtcgttaaaactttctgcataattttgagaaatatagccaattgtatgaccataatattgactcaatctactaacattttctccatcaaattggtacgaatcatacgtgcaggttaaatcaaatggtaaatattcaagtaaggctttagcaatcaaactttttccagcgccgctctctccaatcaaggcattaatctgttgactaaaaattttcaaatcaatccctttaataagagatttctcacaagtattctttattgttaaattttgtatatcaatgagactcatcatattcaccccgttgtttcagcaatctatctcttagtgcatcaccggttaaattaaaaattaaaatagttatagcaatgactgaagcaggtgcaatcaacataattggatgagacgaaataaaatcacgaccttgttgtaacatagcgccccactctggtgttggcggttgtgcacctaacccaataaatgatagtgaacttatatatagaatgattttaccgaaatcaacgaccatcaaaacgataatagccggtataattttaggtgttaaatgacgtattaatattgttcttgtaggtacatgaaataattgtgccatttttatataaggcttattcatttcgctattaactatacttctagtcaaccttgtgtaattcatccattttattactgtaattgagataactaaattccataaagatggttgaaaaaagcttgctaaagcaatcatgatgataaattctggaatacttagaccaacatcaataaaccttaacactaatcgttcaatccacccttttttatatccggcaaatagacctagtgtaacacctatgacaacgatagctattaatgttaaaacagtaacaaacaatgttgaacgtgcaccgataataattcgggtaaataaatctctcccataatcatcagttcctaataaatgcaaccaactaataggttcaaaagtttgtgataaattgactttggttgcattttcactactgacaaagaattgcagtacaattaccacaaaaataaatgcaacgaatacaaaaaatatcaggttattctttgaatatattttatgcatggcggtcactactttctgatatcaatggtgtattggttttgctttttggatttcctaattgtaaacgctgcttcggatcaagtaataacgttaataaatcagcaatcgtattgataataacaacgaagaagccaataaataacacgcatccttgaataacaggataatctcgagatttaatactatccattaatagataaccaataccaggtatatcaaataaattttcaatcactacagtaccacctattagactgccaagtgaaatccctagtaatgggataatcggcaaaattgttggttttagtaaatcatgaattaaaatataacgttcattcataccgcgtaatcttgatgcttgtacgatattactttgcaataacatcaataaattagaacgcactaaacgaatgatgtatgcacacatacctaaagatagcgtgattacaggtaatataaactgacttagtataacgctatctatattcattaaatttgtgacaataaataataaaataataccgataaagaacgctggtaaactaatcgatagtgttgagatcactctaatcactttatccgtccacttatgaaatcgtttggctgctataatgccgagcggtatagatatgcataacgacactactaatgttgaaaatgatatgagtaatgttatgggtgcatagttgaataatatctgtgttaccggttcttttgattcaaaactttttcctaaattaaaatgtaataaatgattcatccaatgccaccactgtaccaataaagaatcatttaatcccaatttatctttggttgcatttatttgttccgtcgacacttgtgctacatcaagatgtaatattttatcaacaggattgcctggtgataatttcattaaaatgaatgtaagtgtagaaataacaaataaaacaactatcatttgcatcagtctatacaacatagactttattatgaacataatagtccccctccttgtgtaagttactaacactttctttttacatgagaatggcgcatgtatatgcaacttacatattaagaaccaacgttcattatagtattatccataaagaaattgaagtatatttaattttttaacaaaatcattataaaatataatattttgaatcaagtcaaccatgtaaaatataaaaaagtcaaaacaaaaacaactatagcactgtattccacctctttcgaaataattgttactgcagtgtaacttaaaagtcgatgattttgtgcatatagttgtcgaatattattttttatctttacggcgaagttcagcgccctcatagccgtatttttcaatttgcttttctaatttacgcgcttttctttctttacgccaatttctagtaaaataccataatagaaaactaattaataaactcataatcgctaaaaatgcagcgtatcctaataatggttgatattttatatcttgaaaatttggaataaaaaatgcaagcacacctaatataacaaatgtaattactgcagatacaaaccatttatttaaaactaagcaacagaatattgttaataaaatcattattaatgttgtgatccataaataattaggcatatcgaataatgtcatattcattctccttttatttcattactttccttgtatacattttattataaatttttaaaaacttaaacaatagcagtcagtttcaagcaatattctatctactattagaaaaatcattgttccttgcgacatggaaatcgtaacattatcgtttaggagacaaaattatgtataatgaatgtattataccaaaggagtgattatatgtctcaaggtttacctttaagagaagatgttcctgtttcagaaacatgggatttagtagacttatttaaagatgatcaacaatattatgaaagtattgacgctctagtacaacaagcaaatcaatttcatcatacatatgcaacaacattaaattcaatcgaacaaattaatactgctttagctgaattagaaaatattttaattgccttagatcgcttaagtaattatgcagaactacgtttaagtgtagatactagtaatatcgaggcacaagtattgagcgctaaattatctactacatacggtaaaattgttagccaattatcatttgtagagtcagaaatacttgaattaccagaagaaatacttcaacaattagaagaatcatgtccatatcaacactatattaaacagttaataaaacaaaagccattccaattatctgcgtcggtagaacaagtattagcaactttatcacctacgctaaacagtccttacgatttatacggcacgacaaaaatgctagatattacattcgattcatttgaacatgatggtacaacgtaccctgtcgactatgctacgtttgaaaatgattatgaagataataaagatcctgagtttagacgtaaaagtttcaaatcgtttagcgatgggattcgaaaatatcagcatactaccgcggctacatataatatgcaagtacaacaagaaaaaattgaagctgatttacgtggatttgaatcagtcatcgattatttattacatagtcaagaagtaacgcgtgatatgtttgaccgtcaaatcgatatgattatgcgtgacttggcaccagttatgcagaaatatgctaaacttttacaacgtattcacggattagataacatgcgttttgaagacttgaagatttctgtagaccctgattatgaaccagagatttcaattgaagactcaaaaaattatattttcggtgcgttaagtgttttaggtgatgactatacaaacatgttacgtgaagcatacgatcagcgatggattgattttgcacaaaataaaggtaaagatacaggcgcattttgtgcaagtccatactttacacattcatatgtgtttatttcttggactggtaaaatggctgaagcatttgtcttagcacatgaattaggtcatgcaggtcattttacattagctcaaaaacatcaacaatatcttgaatcagaagcatcaatgtactttgttgaagccccttctacaatgaatgaaatgttgatggccaattatttatttaacacaagtgataatccaagatttaagcgttgggttattggctcaattttatctagaacatattatcataatatggttacccatttattagaagctgcttatcaacgtgaagtgtatcacaaagtagatcaaggtgaatctttaaatgcgccgacattaaatgaaataatgctaaatgtttataaacaatttttcggagatgcagtagatatgactgagggtgctgaattaacatggatgcgtcaacctcattactatatgggattatattcgtatacgtattctgctggcttaacaatcggaactgtcgtttctcaaaagattaaaaatgaaggccaaccagctgttgatgcttggttagaaacattgaaaaaaggtggtagtgtatcacctgtcgaacttgcaaacattgcaggtgtagacattactacagaacagccacttaaatctacaattaaatatatttctgatttagtcgatgaagttgaaaaattaacagatgaaattgagcaagcaaataactaagatgcgagacaatttatagtagaacaatataaaccaagattttcacattactaattgtgagaatcttggtttttttgagggtttatgaataatagaaatatatatttatcgtaagggattttatagtaataactttaagttattgttcgtaatgtgtacctgttaaataaaaataaacactttcagcgatgttaataatatgatcaccaatacgttctaaatgtcttgctgctaaatgagcttgtgcagcgacaaatggatcgttatcaataagatacgttgcgttaataatatgactatataagtcatcgatatcttcatcacgctcgattatttctcttattaatacggtatctttctttttaaatgcttgatctaaatcctttaacattaacatagctaatttacccattgtctttaaacgggttaacacataatcatctgtaatctttgtacgcaatcgaatattggcaatactcgaggcattatctcctattctttctaaatcggaggcgatttttaatgaagaaatcatcatacgcaaatcactcgcaatgggctgttgctttgtaattaacatgataactcgctcattaatatcataatttaattgattgatatgtttatcgtttttaactgtttgtcgtgcaaagcctctatcgtcaatacttaatgattttataccattttcaatactcacatagacatttgcacctaaccgacgtaattcttttattaaatcatcaagttgctcctgatatcgttgtctaattattgccattatatatcaaccaaaccttcctgaaatataatcttctgttttcttgtttgatgggttagagaaaattttatcagtatcatcatattcattgacataaccatttaagaaaaatgcagttttatctgatacacgagctgcttgttgcatattatgtgtaaccataataattgtatacttttcttttagttcttgaaccaactcttctactcttaatgttgagattggatctaatgctgatgtcggttcatccattaaaatgacttcaggttcaattgctaaacaacgcgcgatacaaacacgttgttgttgcccaccggataaactatatgcatttgtgtgcaacctatcctttaattcatcccaaattgcagcgccacgtaatgatttctcaacgatttcatcaagaacttttttatttttaataccgtgaatctttggaccgtaagtaatattatcgtatattgattttggaaatggattaggttgttgaaagaccatgcccacatttgtacgtaattgttctttagaatatttttgatcaaaaatgtcttgatctcgatataatattttaccagctgttttcacagaaggtactaactcaaccattcgattcaaagttttaatatatgttgatttgccacaaccagatggacctataatggcagtaatttggttttcataaatatctaaattaatattttgtaatgcatgattttcgccataccataagtctaaattttgtgttgaatatataacagaatgtgagtttgtatcatctggtgttttatgatgactttgtgagacatcaaacgtatgactttgagatatttgtttagtttgtgcaagtgtttgcgccatatttaaaactccctttttaatagataaatgagattgattgtttaaattagaattttttactaaatttgttacgtaaaataatcgcaacgccattcattaagattaagataactagtaaaacgataatgcctgccgatgcaacattctggaattcttcttgaggcattttcgcccaagtaaatatttggattggtaatgctgaaaattgatccaatatacttctaggtgttgccaataatatagtcggtataccgattagcacaagtggcgctgtttctcccagtgctcttgaaagagacaaaatgaatccagttaaaatacca

SEQ ID NO: 5 - DNA, 2846546 bp, Staphylococcus aureus subsp. aureus 11819-97 (residues 1,423,274-2,846,546 of 2,846,546)
ggtaacgctgctggtaagacaacacgtcttatcgtttgccatttattagcacctaaaccataagaagcttcgcgtactgagttaggtacagctctaattgcttcctgacttgaaacaataataattggtaatatcagtaaggtcattgttagcgctgctgccaatatactgttacccattttcaaggcttcaatccccgcaccaccaacgaacaaagtgtaacctaataacccaaatacaactgatggtacaccagctaaattggaaatactgattttaacaaactgagtaaatttgttgtttttcgcatattcttctaagtatatagctgtacctattcctaggatgattgataatggaatgatacttaacattaaccaaagtgaaccgattaacgcgcctttaacgccagccatagatggtgttgaagaagaaaaattagtgaaaaactgtaaatttaaatgacttacccctttaatcaatgtttgagttaacaacgcaataagtacgacaagtcctaataatgtacatgctaaaaatatgagtttgaacactttatttttaaccgttctggatgataaatgtttttggacaagttgttgatcgacgagtgattgtctattattatctgtcgtttccatattaatactcctccctaaaacgcttagaaatccactgagaaagtaaattcatgattaaggtaaagataaatagtgtgaaccctacagcataaatactgtaataaatatttgatccaaatgttgcatcacctgtcgctatctcaacaatatatccagtcattgtttgaatcgaacttgttaaacttaatgaagctgttggcgaactacctgccgctaatgatacaatcatcgtttctccaattgctcttgaaatcgcgagaacgattgaagctacaatacctgatgttgctgcgggaagtacgactttagttgctacttctaatttagttgctccaagtccataggcaccttctcgaattttatttggtacagatgccattgcatcctcactcaaacttgtgatgagagggacaatcataataccgacaactaagccgggacttatagcattaaactctccaagacctggtatgaaagatcttaatactggtgtaacaaaggttaatgcaaagaaaccaaacacaattgttggtattcctgctaaaatttctaatatcggtttaattatgcgtcgtgcacggtcacttgcatattcacttaaataaattgctgcaccaagcccgactggaactgcaaatatagtcgcaataactgtgatttttaaagtccctattatcaatgcccagataccaaacttagggtctgaaccggtaggattccaagtagtagaaaatagaaattcagttattggaattctggtgaaaaaagtgatggtttctaaaagcaatgtgattaatatacctagtgttgttaaaatggaaatcgctgaaattgcggctaaaataactggtataattttgtcattatgcttcccttttttattattatttttttcgattaaagctttaacattagtagatgaagtcataatcaaacctctttctattactcccaaaataattagatttgtaaaataatgatgaaccactattttaagttgataagcttgtagactaactgaatgtcaaaatcagcgtctcgataaatcaagctttgtactctaaataatgattcaccatcaaaatcatgtttcaagacacatttgaaattgcgtcttattattttttgtcttcagactttttatcatcagatttcttgtcgtctgatttttgatttttatcaataaatgcttttaaatcatctaattgtgatttgtatgttttctctggtgctgctacatatccagcttcttcagctgctttacctttatcttctaagacgaatttgataaattctgacattactttattatctttcaatgctttttcatttacataaatgaataatggtctacttaatgcataagagttatcttgaattgtttttttcgtaggctctgttgctttaccattttcatctttgattttaacttcttttaatttatctttattttgaacgtagaagttatatccaaagtatccgattccctctttgtttttcgttacagaagaaacgatagcatttgtatcagcatttttttctgctttaatatcttctttattcattacttcattttcaaagaagtcataagtaccatgacttgagtttggtgatacagcatttatttttttatctggccatttactattaacatctttccatgttttagcttttccagaataaattgcttttaattgctgtttgtctaattcatccacaaaatcattttctttatttacagcaaccgttacaccatcttgcgcaattttgaattctttgtatttgatattcttatcttgtaatttttgcttctcttcatctttaattggtctagaagcatcagcgaagtcgatatctcctgcaatgaatttttggaaaccagcacctgtaccagcttgtcctgctgagattttagcatccgagtgatcttgagcccatttttcatttaatttctccacaattggtgctactgttgatgagccatcacctttagcttccccttttaaatcactattaccactgccaccattaccgccaccacaagcacctaataatagtgttgcacctaaagctgtagtaccaacaaattgccattttttcattgaaatatcctccctgtatgaacaacaaatagtatttgtattgattacatctttatcttaaccttgaattattaacctcatttttagaaactgtaaatgttacataaaaatttgttaagaaaatgtaaatattaatttttgttaatctaaaaaatattgcttcattagtaaaattaaaatgcttcctgaagaattatcgaaatttaaatatgaatacaaaaatggctgggacataaatccctaaaaaaacagcagtaagataattttcaattagaaaatatcttactgctgttctctatttatacaatacttcgtattgaatggcttcgctttgcccgtctggcacattactgtaaaattctataaatagaatttttgatgacgggtcccttcctagggtgccgtctcagccaccccaaccggcacattgttgtaagcttgactatatgtcagcttctgtgttggggcccctgtcttcgactggcactgctccctcaggagtctcgccattaatactacgtattaacatgtaattttactttgaaatacattaaagcccaaattaatcaaaagctttctgaaccagaaacgaaaaaaatctatagtcatagaaaaatttatgtagagcctgtttttggatttatgaaggttattttgggtttcactcgaatgtcagttcgaggaataaataaagttaaacgagagctaggttttgtattaatggcacttaatataaggaaaatagcagctcaacgagctgtacattataaaatacatatcaaaaaagctaatttccatcaaataattaatagaaatcagcttttttacattgcctaagaacttaatgtcccagcctattcgtttgaattatttaattttttactttgaaaggaatgtttaaaaaactacttcatctgtccgacttaatattgaataaaaaaacacgcatcctacgacacgtgtaaaaatgattattcttttgagtcaattcgactccaaccttttttagttaaagtgattttacctgtttctatattaataatcttctgtttatataagtgaccgattgcacgtttgaatgaacctttactcatattgaatacttctttaatcgcttcagggcttgatttgtcccagaatggtaattcaccatcatattcaactagtaaatcaaagatgacttggccgtcatcgtctaaacgttcatgtgcaagtggtaaaaatgaaccatttaactcacctttatcattatgcccgataattctaacttgaacagattcacctaatcttggttcagctttacgttctgattcatgtacgaaaattttgtaacctgattcgcttaataaaaagctaccaattcgtaatacgcggtaaggtttggcttcaatgacttcgttttttaaattatcgtcgtgtacaggtgtaaacatattttctacaacagattcactcgctaatcttccatacatatgattctcacggtcaattcgtaatgtgactagcaaatgatcaccaggttgtggccatagtgatttcacttttggtaaatcttcccatggtactaacacttcacggggtaatccaacatctatacgtgccccatcgcgatccgttttaagtactttagcaaagtcatatttatctttcgtaatatcaggcatattttgagttgcaaataattcacctgaacggtttggataaatgaagaaactatattcttcacctacttctaattcatcatcatcgttcatttctgattggtttaactttacgttttcaccgtttggtccttttaaaaggtaagttgagccttgtaaccctactacttcaaggaattctatagaacctactatatctttgtctaatgccatgttattctccttcgattcttgtattctttattattataacatgtgtgagtcattctatcattacaacttatatgaggtcgaaactgtgacgataatatgatataattcttccgttagaatatcgaatgaaaaaaaggagaaaatgcatgttacaagtaactgatgtgagtttacgttttggagatcgtaaactatttgaagatgtaaatattaaatttacagaaggtaattgttatggattaattggtgcgaatggtgcaggtaaatcaacattcttaaaaatattatctggtgaattagattctcaaacaggacatgtttcattaggtaaaaatgaacgtctagctgttttaaaacaggaccactatgcttatgaagatgaacgcgtgcttgatgttgtaattaaaggtcacgaacgtctttatgaggttatgaaagaaaaagatgaaatctatatgaagccagatttcagtgatgaagatggtatccgtgctgctgaacttgaaggtgaatttgcagaaatgaatggttggaatgctgaagctgatgctgctaaccttttatctggtttaggtatcgatccaactttacacgataaaaaaatggctgaattagaaaacaaccaaaaaattaaagtattattagcgcaaagtttattcggtgaaccagacgtactattactggatgagcctactaacggtctcgatattccagcaatcagttggttagaagatttcttaattaactttgataatactgttatcgtagtatcgcatgaccgtcatttcttaaataatgtatgtactcatatcgctgatttagacttcggtaaaattaaagtttatgttggtaactatgatttttggtatcaatctagtcagttagctcaaaagatggctcaagaacaaaacaagaaaaaagaagaaaaaatgaaagagttacaggactttattgctcgtttctcagctaacgcttctaaatctaaacaagcaacaagtcgtaaaaaacaacttgagaaaattgaattagatgatattcaaccatcatcaagaagatatcctttcgttaaattcacgcctgagcgtgagattggtaacgacttattaatcgttcaaaatctttctaaaacaattgacggcgaaaaagtattagataatgtatcattcacaatgaatccaaatgataaagcgattttaattggagatagtgaaattgcaaaaacaacattacttaaaatattagctggcgaaatggaaccagacgaaggttcatttaaatggggtgttactacatcattaagttacttccctaaagataactcagagttctttgaaggtgtaaatatgaatctcgttgattggttaagacaatatgctcctgaagatgaacaaacagaaacatttttacgtggtttcttaggtcgtatgttatttagtggtgaagaagttaagaaaaaagctagtgtgctttcaggtggagaaaaagtacgttgtatgctaagtaaaatgatgttatcaagtgcgaatgtacttttacttgacgaacctactaaccacttagacttagaaagtattactgctgtcaatgatggtcttaaatcatttaaaggttctatcatctttacttcttatgacttcgaatttatcaacacgattgcaaaccgtgttatcgatttaaataaacaaggcggcgtttcaaaagaaattccatatgaagaatacttgcaagaaatcggcgttttaaaataaacataatatgtagaatttcttttcgaaaatctctgtattgaggcccgaccaacttgcacattattgtaagttggcttactgtcaccttctatattgggacttattccgcaacttgtattgtttgtagaaattaggaatccaatttctctatgtgttgcaccgacaaggattgaaaaaagctagctacaaagtcattttcattcagtcaactactgtcaatataacattgcaggacctagggcattgattcatgtccgagactatattcaatttaatagacattaactgggcgtctcgatgctaatatttatagcatcgaggtgtcctttttattttattttttaacacatcagcacagtgaacaccccttctctaaattacaaatacagttatcaccgcattaaaagagtacatttatttaatgtgcatattgagtatgctataagtattttgaattttatttttcaaaaagtctcattatcaccacctttttaaaatataagcaacgctataacttgaattttcaggttattccaaaaaatctaaattatcggtttacattcatatttgtcatatgtataatgaacacataccaatttaataatattttgatgaggcgcatcaatcatgagtaaagtttagattactgtctgctaacagctaaatttgaaagggtgcgatgccgaagcgattataatagcagttataatttgttggactttttggttaagagctgagagtttgtcattatttaaaaataatggagtgcatcacttgtatatagattaagagcaagttcgcattccgatcttgttctttttttattattgtgtgcccttcctaacaattaggaggattatatggtaacaagaagtgtgttgaaatttggcggatcatccgtcagtgattttacaaaaataaaaaggatcgctgaaatgttaaaggagcgagtcaatcaagatgaacaattaattgtcgttgtaagtgctatgggtaacacaacagatcaattaatgacgaatgtatcgaccttgactaaagcaccaaaacaacaagaactggcattattattgacaaccggagagcaacaaactgtatcttatttatcaatggtattaaatgatatcggtgtgaatgccaaagcaatgactggctatcaagcgggtattaaaaccattggccatcatttaaaaagtaaaattgctcaaattaatcctcaaacatttgaacaagcctttcaagaaaacgatattttagtagttgctggatttcaaggcatcaatgaacatcaggaattaacaactttaggcagaggcggttctgatacgaccgctgtggcacttgctgttagtaatcaaataccttgtgaaatttataccgacgttgatggtgtgtatgccactgacccaagacttttaccaaaagctaaacgactagacatcgtctcatatgaagaaatgatggaaatgagcgctttaggtgctggtgtacttgaaacaagaagtgttgaattagctaaaaactataatatccctttatatttaggaaaaactttatcgaacgtgaaaggaacatggattatgtcaaatgaagaaatattagagaaaaaagcagttgctggtgtggctttggataaacatatgatgcatgtaacaattagttatcccctacctgacaatcagctacttacccaactatttacggaacttgaagaaggtgctgtaaatgttgatatgatttcacaaatcgtcaacttggatggactacaactatccttcacgattaaagatagtgattttcatcaaatttctatgattcttgaaacattaaagaatcaatatgaagcattagcttataaaatcaatgagcattatgtcaaaatttcattaattggctcaggcatgcgtgatatgtcaggtgtggcatcaaaagcatttttgacattaattgaaaataatatacctttctaccaaacaacaacttctgaaataagtatttcatacgtcattgatgattttaatgggcaacaagcggtggaaaaactatatgacgcatttaacatttaatggtaaaattattgttaaaatattctaaaaattggaaattattataaaatggagtgacaagttatgacaaaattagcagttgtgggttcaacaggattagtaggtacaaaaatgttggagacattaaatcgtaaaaatattcctttcgatgaattagtattattttcatcagcacgttctgcagggaaagaagttgaatttcaaggaaaaacatatacagttcaagaattaactgatgctcgtgcaagtgaacatttcgattatgtattaatgagtgctggtggcggtacaagcgaacactttgccccactctttgaaaaagctggtgcaatcgttatagacaattcaagtcaatggcgtatggcagaagatattgatttaatcgttccggaagtcaatgaacctacttttacaagaggtatcattgccaatccaaactgctctacgattcagtctgttgtgccattaaaagtattgcaagatgcttatggtttaaaacgagtggcatatacaacatatcaagctgtatcaggttcagggatgaaaggtaagaaagatttagctgaaggtgtaaatggtaaagcaccagaagcatatccacatccaatttataataatgtgttaccgcatattgatgtgtttttagaaaacggatatacaaaagaagaacaaaaaatgattgatgagacgagaaaaattttaaatgcgccagacttaaaagtaacagcaacatgtgcacgtgtgcctgttcaagatagtcatagtgttgaaattgatgtaacgcttgaaaaagaagcgactgcagaagatattaaagcattatttgatcaagatgaccgcgttgttttagtagacaatccagagaacaatgaatatccaatggcaatcaattctactaataaagatgaagtgtttgttggccgtatacgtagagatgattcattagaaaatactttccatgtatggtgtacatcagacaatttattaaaaggtgctgcattaaatgctgtacaagtattggaacaagttatgcgtttaaaaggagcgaattaaaatgacacatttatttgagggtgttggcgttgcacttacaaccccttttacaaataacaaaattaatattgaagctttgaaaacacacgttaattttttactagaaaataatgcccaagcaatcatcgttaatggaactactgctgagagccctactttaacaacagatgaaaaagaacgcattctaaaaacagttattgatcttgtagataaacgtgttcctgtcatagcaggaactggcactaatgatactgataagtcaatccaagcttcaatccaagctaaagccttaggtgctgatgcaattatgttaattacgccctactacaacaaaacgaatcaacgtggtttagtcaaacactttgaagcgattgcagatgctgtgaaattaccagtcgtgctgtacaatgttccttcaagaacgaacatgacaattgaaccagaaactgtagaaatattaagtcaacatccttatatagttgctttaaaagatgctacgaatgattttgagtatttagaagaagtgaaaaagcgaattgatacaaattcatttgcattatatagtggcaatgatgacaacgtcgttgaatactatcaacgtggcggtcaaggggttatctctgttattgccaatgtcattcctaaagaatttcaagcgttatacgatgctcaacaaagtggattagatattcaagatcaatttaaaccaatcggcacactgttatcagctttatcagttgatattaacccaattcctattaaagctctaacaagttatttaggatttggaaattatgaattacgtctaccattggttagcctagaagatacagatactaaagtgcttcgtgaagcatatgacacatttaaagcgggtgaaaatgagtgaaaatattactaattggctatggtgcaatgaatcaacgcgttgctagattagcagaagaaaaaggacatgaaatcgttggggtcattgaaaatacaccgaaagcaacaacgccatatcaacaatatcaacatattgcagatgttaaagatgccgatgttgcaatagatttttcaaatccaaatctacttttccctttattagatgaagagtttcatttgccattagttgtggcaacaactggcgagaaagaaaaactacttaataagttagatgaattgagtcaaaatatgcctgtatttttcagcgcgaacatgagttatggcgttcatgcattgactaaaattttagcagctgctgttcccctacttgatgatttcgatatcgaattgactgaggcacatcataataaaaaagtagatgcaccaagtggtacgttagaaaaattgtatgatgtgatcgtatctttgaaagaaaatgtaacacctgtgtatgatagacatgaattaaatgaaaaacgccagccacaagatattggtatacattctattcgtggaggtacgattgtcggtgaacatgaagttctatttgccggcactgatgaaacgattcaaatcacgcatcgtgcacaatcaaaagatatttttgcgaatggtgcaatacaagcagcagaacgcttagttaataaaccaaacggcttttatacgtttgacaacttataaacatattaaaggagatcgattattttatggtacaacatttaacagctgaagaaattattcaatatataagtgatgctaaaaagtctacaccaataaaagtatatttaaatggtaattttgaaggcatcacatatccagaaagttttaaagtatttggttcagaacaatctaaagtaatcttttgtgaagcggatgattggaaacctttttacgaagcatatggtagtcaattcgaagatatagaaattgaaatggatcgtcgcaattctgccattccattaaaagacttaacaaatacgaatgcacgaattgaaccaggtgcgtttattagagaacaagccattattgaagatggtgctgtcgttatgatgggcgcaacaattaatattggcgcagtcgttggcgaaggtacaatgattgatatgaatgctactctcggtggtcgtgctacaactggtaaaaatgtacatgtaggggctggcgcagtattagcaggtgtgattgaaccccctagtgcttcaccagttataatcgaggatgatgtattaatcggtgcaaatgcagttattttagaaggtgtacgtgttggtaaaggtgctattgttgcagctggcgcgattgtgacacaagatgtaccagctggtgcagttgttgctggtacacctgcaaaagtgattaagcaagcttctgaagtacaagatactaaaaaagagattgtagcagcattaagaaaactgaatgactagtgacgtcaacgtataataatttcaaggttgagatacgattatgtctcaaccttattgtttatcattgaataaacttatgatcacaaatttcgaaatacgttacactatttatatagtaatttaacacaaaggattgataattatgaatgaattagaatttgttacgaaacatcgccgtcatttacatcaacatcctgaattaagcttacatgaatttgaaacaactgcttatattaaagcgtttttagatagtttaaatattaaatacgattgcccattggaaactggcgtcattgcatacttagaaggtaatggctcacatacgatagcgtatagagctgatattgatgcgttacctattttagaggaaaatgatgtgccttatcgcagtcaatctgatcatgtgatgcatgcttgtggacatgatggtcatacaactgcattaatgctttttgtacaacgttgcaaagacatgcaagacgcaggtcaattaccgcaaaatgtcgttttcattttccaacctgcagaagaaactggtggcggtgcaaatcgattaataaaagccggtgcctttgataagtatccaattgaagcggtatttggtattcatgttaacccatttgctgatgaaggcattgcagtgataagagatgaagaaattacggccagcgcaacagagtatcgctttttcttaacaggcctgtcaagtcatgttgctgataaagaacaaggtcattcttgtggtgaagcattacaacatgtattaactcaaatatcacaaattcaacaatttcaccttaacggtttgaaacgaaatattgttcatattggtcattttaaagctggtgaagcgattaacactgtaccaagtaatggttatttagaaggtactattcgtacatatgatattgatgatttaacaatcgttaaaaatcaaatgcacaagatagcagaaagtgtcaagcttctgtttaatgtagattgtgaagttaaatttgcagaaggttatccccctacaatcaatagtccgaaattacgtactcaaatagaggacgccttaataaaagctgatttaaatgtctatgacaaaccaacgccattcttatttggggaagattttagtttttatggtcaacaactagctccagcttactttgtttttataggaacacgaaatgaagataaaggttttgtaactggtttgcacacatcacatttaaattttgatgaaaaagtgttaataaacgtggttaatttttacgaaaatttattaaataattacaaagaggtgtaatacattgacagcaacatggtctgtaaataagaaaatatttttacaaaatgcaatcacagtcaaaaacaatcagccattaatggcagttgttaaaaataatgcatatcactatgacctagaatttgctgtaactcagtttatccatgcaggtatagatacatttagcacaacatcactacgagaagcaattcaaattagacaacttgctccagatgcaacaatctttttaatgaatgcagtttacgagtttgatttagtccgtgaacatcaaatacacatgactttgccgtcgttgacatattactataaccataaaaatgatttagcaggtattcatgttcacttagaatttgaaaatttattacatcggtctggatttaaagatttaaacgaaattaaagaagtattgaaagatcaccatcataatcaaaatgcaaaaatgattattagtggtttatggacccattttggatatgctgatgaattcgatgtgtcagattataatgttgaacgttcacaatggatggaaattgttgaagcacttttatctgaaggttatcagttcgacctaatccatgctcaaaatagtgcgagtttttatcgggaaggacaaatattactaccccaccatacacatgcgcgtgtaggtattgcgttatacggttcaagaccatatagttcactgaatcaacatgatatagttcagtcattaactgtaaaagcacatgttattcaagtgcgcgaagtacaagctggtgattattgcggttatagctttgcctttgaagtgactaaaaacaatacaaaattagctgtagttgatatcggttatggcgatggaattttaagaactcgtgctaaacatgaagcacttatcaatggtaaacgctacccgatacgtgcattaatgatgagccatatgtttgttgaagttgatggcaatgtacatgcacaagatgaagttattctttataataatgatatccgcatcgatgaatatacctttaaaggtgttggtgcaaattctgaacaattaagtgctatgaatcatgattctttaaaaaaggagtacatttcaaatgactgttaaatataatcaaaatggcgaattaacaatggatggtattagtttaaaaacgattgcgcaaagctttggtacacctaccattgtttatgatgaactacaaattagagaacagatgcgccgttaccatcgcgcatttaaagatagtggattaaaatacaatatttcatacgcctcaaaagcgtttacttgcattcaaatggtcaaacttgtagctgaggaagatttacagttagatgttgtttctgaaggtgaattatatacagctttagaagcaggttttgaaccgagtcgcatccatttccatggtaacaataaaacgaaacatgaaattaggtatgctttagaaaataatatcggttattttgttatagattcattagaagaaattgaattaatagaccgctatgctaatgatacggttcaagttgtattacgagttaatccaggtgttgaagcacatacacacgaatttattcaaactgggcaagaagatagtaagtttggattatcaattcaatatggcttagctaaaaaagcaattgacaaagtccaacaatctaaacacttaaaattaaaaggtgtacattgtcatattggttcacagattgaaggtacagaagcatttattgaaactgctaaaattgttttacgttggcttaaagagcaaggcattcaagttgaattattaaaccttggtggtggctttggtattaaatatgttgaaggtgacgaaagtttccctatcgaaagtggtattaaagatattacagacgcaataaaatccgaaattaaagttctaggtatagatgcaccagaaataggtattgaaccgggacgatcaattgtaggtgaagctggcgttactttatatgaagttggaaccattaaagaaattccagagattaataaatatgtttcaatcgatggcggtatgagtgatcatatcagaactgcactttatgacgcaaagtatcaagcattgcttgttaatagaaatgaagaagcagatgacagtgtaactatagctggaaaattatgtgagtctggtgatatcattattaaagacgctaaattaccttcatcagtcaaacgtggagactatcttgctatattatcaactggtgcatatcattactctatggcatccaattacaatcaaatgcaaaagccttctgtgtttttcttaaaagatggcaaagcacgtgaagttataaagcgacaatcgttaagacaactcattattaatgatacaaaataaaaataaacaaagtaatccccgaagcacagaaaattatactgtgactcggggaatttttatgcattatagatgactgtagataacatgcttggacatatactctaaaaaaggaagaacagcacatttttagttagaaagtatttatttctttttgtcattaatcctttatatttagttagccctattcaactaatttaaagcatcatatacataccacactttaaacaagcatcatgaaattaggttttatgctttacttgctttttcaaataatataaaacgataagaattaacaacaaatataatgtataaaacagaatttcatcaaatccaaaatctttacttgtaattaatacatcaatatcttctaattccatcatctctgctttaatataattattaaactttggcaaagtcattaaatgtacattgtaaatatagtaataaaagtcgataaatatgatgttaaaaaatatgtatgttttatcaatattagttttgaaaaataatatcccagaaatcattatcggaatcactaatacaatcatcattgctgctaaaatattaatatttaaaccaattgcagataatacaccgaaaactaataaattagcaactaaactaaggataagatatttcataaaatcacctcgtcgttgtacaccataattatattatataaatatttttttctattgcaaacaatgttggtgatataaaaaaagagttctcaatttggttgagaaactcatcgcgttaagtatttgtaataagcatataaaaacaccttacttcttggtaaggtgttagttaaaatcaatgattcaaatctaagaattatagtttaacaacgtttgcagcttgtggaccgcggtcgccttcaactacttcaaactcaacagcttgaccttcttctaatgatttgtaaccatcttggttaattgctgaaaaatgtacgaatacgtcattttctccttcaacttcgataaagccgaatcctttttcagcgttaaaccatttaactgtaccttgtttcataatctgaaacctccaagactaaaattcattcaatatgcttattcgcatattacaaaaaatacatgcaaatttcactcaaatattctttgcaatatggaataatcatctgcttaacttgtattatagtgcagttattaccaaattgcaatacaataataaaaaatattcatttaatcaattattggtagtttataatatacttcattattttgtaaaacaatgaaactataaaatatttgtaaatcctcttcacaatcttcgcaatagttcatgtcacaattattataaaatgcataaatattatatttgcctgtgacataattatcgaactgaactttacattgattaatcaattgttgatagtgcttaaacatgtcatcaaaatcttgatattgatatttttcaacaatgttttctggccagtcactgaataaccaccatccctcataatcggctctaattttggtaactgtccacattattaaagaccccttccatacttcaaaaactctatacttatttttatacctttatcctctgaaaatcaagtttgacgacttgaaacaaacaaagtattaactatagtaattattagtttttttaagtaaaactacgtataataacattatgaggtggtaaaaatgagacatgtacatttacaagtattcggacgcgttcaaggcgtcggatttagatattttacacaacgcattgcaatgaactataacattgtcggtactgttcaaaatgtagatgactatgtagagatatatgcacaaggggatgacgcagatatagagagatttattcaaggtgtaattgaaggtgcctcaccagcatcaaatgtaacaagccatcaacttgaagagttagaactaaatcaaaaattatcggattttcgatcaatataaaatgctaaataaaggaagatgacagtgagatataatatttctcatatatttggggtgttagtgggaattcctgtagcgtttttaacaagcatatttgggatgattgcacttgatgtatcttttttaattgatatgtctattggtattgttggctttttaatgacatacctaccgatacaaaaactcacttcacgcaaatatttaaacgaaattggtttgactagaaaagactatcgctatattcgaaatcagttaaatcatacacaccaaaaacttagaggtattttaaaaacgtatgtcaatataagatcaattaaagattttaggcagattaatgatatataccaaatttcacgttctatttatacgacagttagacagagacctgcatcattttataaagttgaaggctttttttattctcatattgataatgctttaaatttggttgatgcatatacacgtctagcaaaaatgcccaaaaaatcaattaatgaacagcaaaagttagaacaaacacgaattactttggatgaggtcaaacgaacattaatcgctgatttaaagcgtctcaacgaagatgattatgaacgtttagatattgaaatggaattaaataagttacatcaaaaacatcatcaagattgatgtaaaatagcaactattggagagatgattgatgactgaaaataaaagtttcaaagaaagctatccactagatgattttataagcgataaagaattatcgaatactactattcaaaaagaaaagttaacaattgaacaacaaaaacaggtagacacaatcagtaaacaaattaaccctttagacaatgaaggtttattagcgtttggttctgatttacagaaacaaatgtctcaattttcacatcaaatgttggatgaagtacaaagtaaagatgttggtcctattggagatactttgtcagatctaatgtcaaaactaaagtcagttaatccaaatgagttaaatactgataaaccatctatgttaaaaagaatttttagcagagcaaagtcgtctatcaatgaaatcttttcaagaatgcaatcagttagtgctcaagtcgatcgcataacgattcaactgcagaaacatcaaacacatttaacaagagatattgaattattagatacgctatatgataaaaacaaacaatactttgatgacttatcattgcatatcattgctgcacagcaaaaaaagttgcaattagaaaatgaaaagctaccacaattgcaacagcaagcgcagcaatccactaatcaaatggatattcaacaagttgcagatatgcagcaatttatagatagactagataaacgcatatatgacttacagctttcaagacaaatagctttgcaaactgcgccacaaattcgtatgattcaaaatgttaatcaagcacttgccgagaagatacaaagttcaattttgacaagtattccactatggaaaaatcaaatggccattgcgcttacattaatgagacagcgtaatgcagttgctgcacaacgagctgtcactgatacaactaatgatttattaacagcaaatgctgaaatgttgaaacaaaatgcgattgaaactgcaacagaaaatgagcgtggcattgttgatcttgatacattgaaacgtacacagcgtaacattattgagacaattgaagaaacattaattattcaacaacacggtcgcgaagaacgacaattagctgaaaaagaattacaacaattagaacaagatttaaagtcacatttagtgaacatcaaaggaccgaataaacaatcataaattacgaattagatataacaaaaaggaagcatcctacgattaaattggagatgcttccttttatattattcgttattcctgttgatatttaattggatcttgttttacaaatatgccgactagatagcctaatatcgttgcaataattgctactgggaaccactctaaagaatacgctcttagaggcaatgattctataaagttaattttcagccaacctaacttactaataacactgaaaatcgacaatataaatacgataataactggaatttgttgtgaaatgcgttttgtcggtatgaatttggcaattaaaattaataatacaacagttattgctactgggtatacaatgcttaataccggaattgacattgagataacagcatttaaaccttggttagcaataataaaactcattaaaatgaaaactaatacaaatgctttgtatgatactttaggtacgattctatggaaatattcagaaactgcaacaataagcccgcatgctgtagttagacatgccagcgccacaatgatgcccaataaatattttccgaatgaaccaaatcctgttgaagccattgtcgttaataaatatgtcccaatgtttcgatctttggatttcaattgatctaacgtcatgtcacttactggcatatgattaccaatataacctaatgaaatatatatgaaaattaaagctacggctgcaattaaaccagcagtcaaagtttgtttgaatatttgatttgttttagtaatgcctgttagttttactgcattaacaacaatcattgaaaaagcaattgctgcaatggcatccattgttaaatagccttgtgtaaagccttcagcaaaacttgaaaaattagaatgatatagtgcttcattgccctttccagcactattaccgctaaagtctaagtatcctttaataatcatcgctaaaatagtaatcaataataatggtgttaataatgaaccaatacgatcgattaacttagatggatttaaacaaatatacaaaacgactatgaagtagataatcgtaaatataaataaagcgatactactattgttatgtataattggtgtaattgtcatttcaaaagatgtagatgcagttctaggtattgcgaaaagtggaccaatagtcaaataaatgatgattaagaacaatattgaaaatttaggtgaaattttatttaatgcgccaatatatccttctttatcaagtgcacctacaatcacacctaataatggtaaaccaatcccagttagaacaaacgctaaaatggcgggccagaaaaattgaccactatccaatccgagattaggaggaaaaattagattgcctgcgccaaaaaacatagcgaagagcgtaaacccaatgacccatgtatttttattcatagagttactcctttttttaaaacacgaaataatttacaagtaaatattttagcacaaaaaataataaagagtctatatgaaatatgttgtacatagcagaaacaaaacacatgtgttgtttaaatcaaattatgccagaaaataaaattcttcaaattcactttttaaatagtaactgatgacttttattcacaatttcatataaactcatattttaaacttatttataaagatttaagtagtaatttttttaataatggagagagatgtccaggtaaatgcgcaacaccttcaacgaaaatagcatattgaccataaatattatgaattgtttgttcaacatcttcagttattggatcttgactcaaaaatacattaaatacttcaataccaaatttacgtgacatttctacagcttcatacgtatcaataataccatcttgactataattaaatgcagacggttcgccgtctgaaaatacgattaaaaatcgttgatgttgatttcgacgcattaatcgttcacttgcaactctaatagcaacaccatcacgattatcatcttgaggttcaagtgccataatacgtgggccatctttttcaaaggttgagtaatcatagttaataatttcattaatgatatttggttgtgcatgatcgtctgaatcaaaggcatcctcactgaatgataaaatttcatgtttaatgttcaatgcttttaacgtctcgtggaataacactacacctttcttcgtttcagccattttatcatgcatacttgctgacgcatcaattaacaatgtaaacgtcgcatcaaatgatttacttaaatcttgttttttgtaaaacaatttatattgatcgtcgataaaccaattaattaaatccttttgtaatcgtccttttgttaaattaaaacgtgcatctcgttgttctcgttcaatcgttttctttataatttgaattaagtctttgatttcatattgtacgtcttgtttcgattcttgatattctaaaacatattgtggctcaatttcaggaatttgccattttatttctacatttttgttcacaccatcaagttgaaatgcttggctttgaccaacagcatcgccttcttcacgatttagcgtatcgtttgaacctttgccctttttggtcatcatatcagtcatatcatctgtagcatcgccttcacgtgcttcatcattacccaatgtttcactattttgtccttcgtgaagttccatttctaaataggcgccaccttttgactcactatctgcagatttagagtcagctttttcactttcgttatcatcatcttctgaagtatcatcttgcccatcgacttgacttgcatcagttctctttaaatcatcaaactctggactagctaatgtattatatagtgttttaggtaagtaataatattcgtttagcatatcttcttttaaaatatcatctacttgatacataattctttgagccagatacatattatcttcagaattttgattttggaaaaaattaggtaaatataagaacatattaactacaatatcatctaaatctgaatgtatagatggtatatcaaagaaatcttggcttaaaaatgcatgttctaaatacaaaaataataaatctgtatattgtgttttagtacgatacactttaatttgagattccgtatatgatatacgtgtatctaggcgaagatcaattaatttagcagtacttgggcgctcaactttaatagaatttaatacgcgcatatcttctaataatttaaaaagttgttgataaaatttagggtgtttaaaagttttatcttgtactacttcatttacaatttgtacatccatcatatgataaccgtaagcagctaacataacatctgtttttaaaccagccatttcgatatggcttggtcgatgtgaccaaaaccaactcgtaatcaaaacattttgaacaggattatagtaagggaatttttggattttaacttgtgtttgttcattttttaataagagtcgagctaagtcttgcaacatcattacttgcttggcatctaactgttcgtcgttaaattttatgaaacgatcactcatgtcttatccctctttaaaagtttagttctacagcattatatattgcttgttgttcacgttcatcttccaatttatcaataattgtacgtttaattgcacgttcaactggcattacagtgattaaatcacacaagtctaataatgcacggatactagcggcttcttcagaaatttgtccctgcttagacatagtacgtaaatcttcgttaaacttaataatttgttcgatttgtttatcatcttgtaataaactttgctctttaatcacattttttaaaatgtccccgtcaatataatcaacgtgaataacaacaaagcgattttttagtgcttcattcattggcaaagtaccaacataaccttcatttattgctgctataacgttaaatcctggtacagctttgattacttcaccagtgtatggattcgtaatttgacgacgataatctaagaccccatttaatacaggcaatgtttcaggtttagccatatttatttcatcaatatataaaatatgcccctctttcatagctttaataactggaccatctacaaagacaatttcttgttgaccttccgcatttgttttaattgttttaaagcctaataagctttctgtatctaaatcaacagaacaattgacttgatgcatgggtgtatcaacaacttcacttaatgtttctgccaactttgttttccctgaacctgttggacctttaagtaaaatatttttatttaaatcaaataatgccttcgcatcattgaaaactgttgaatctgaattcttataatgttttagtgccattttaaaacgttctcctttaaataaattaaaaaactaagacatggaataagttctccaaatgccttagtttactattctattctgatataaaacgcaatgcttagtatgcgaattgtttatattttaccaaatttactaattgaaaatctcatattaggcttcatttcaataattatgcgtttaaacttctttgaaatatgttttatagtaaccgccaactaatccagaattatctattatttgataatattcttcagtttcgttgataacatcatattgtttgccaaccgttaacatgtcagaaactgtaaatttctttgcatctgtattaatgacttctactttcttgattggtgtacgttctttccaagtttcatgtaacataaattttgtcctcactatcgtaaaaaaattatttttgtaaagtgaatataaacgataatccactgttttcagtaattctaattgattcaatatcatcttgctcaagcgtttgatatggtatttccacttcatctaagcgcgatttcgcttgattaaagaaatctgcatctttcgtttcaaactcaacttgatcgactgcgccatattccggcattgtcatttcggtttctacaggcattaaatgtatttcgccacctagaccacccgttccaattttgaatacttggacatgatagtcagcattgtcgaagggttggtattctgcaaatacttcaagtccgaatatatttgttaaaatttgacctgtaatatctacatgattcactttaagaatcactggtcctaaaccttgcacttgatgtaacggattgaccgcactctcaaaagaaggcatacctaaaccaacgccataattattctcgtttgaatatattgagaaaatatgaccattgttatcttcgagactgaaatatttattgccatttaattctttaactgttgtaaatggaatatccttattcgataatatttccgcatactcctctaaacctgagtcagttggtgtacgtaatccaatacccacaaagtgagattcttctaattgctcacttggaacttgtataaattgaagtcttgttcctgggcttatatctgcatcgccgaaacgaattgagttttcaagaagttcttcataatttaatcctaatatgtcaaccatgaaatgttttgtctgttctatatttgttgtacctaatgttatacttctaagtccacacattatagccacctctatctttatctttactattatattataacttattttaatcataaattatagaatatcggtcagttgattttgattatagattaatatgtgaaaaatgtatttctttaaaagaactatttcatttaaataggtaacataatattgttatggttgctattgagtgtgtcattaatgagtatctgtatatagcaattgaatatttcgttttttgtagtacataaaaaacatatatatgtcgtgtccataaagtgaatttacatcttgttcagatgattttaaattaactaaaagcgcttatagaattcaaaaatttcatcgcttgttattatctaaaatgatttcattagcatattgtaacacgctattctacctatatttctattgtgagtctatttcaatagaaatgatatattttttaagtagtcaaaattaaactcacattttaatacgaagcattataaaaataaagtacagcagtaagatatttcgactagaaaataatcttactgctgtttgttattgatttgattacgtttttaggaatagtaaactattttgtgttgtggattaagattctaataataagtcttctgggttttcaattaattctttaattgtttttaagaatccaactgcttctttaccgtcaataattctatgatcatagcttaatgcaatatacatcattggacgattttcgattgtatcttgatcaatcgcaattggtcttgtaataattgaatgcatgcctaagattgcagcttgattaccattgataattggcgtactcatcattgatccaaaaataccgccatttgtaatcgtaaatgaaccattaaccatatcatctaagccaagttttttctctcgtgctttaacagctaaattagcaatttctgcttcgatttctgcaaaattctttttatcacaatctcttacaaatggtactaataatccatcatctgtagaaacagctacaccaatatcataatattgtttcgtaatcatgtcgtcgccgtcgatttctgcattaacttctggatactttttcaaagctgctacagaagctttagtaaagaatgacataaatcctaatttagtaccatcatgatctttcataaattgttctttcttacgtttacgcaattccataacatttgtcatgtcaacttcgttaaatgttgttaacatagctgtattattagatacctctaataattttttggcagctgttttctttctgcgtgacattttttcacgaatcactggttttgtaggatattgattgtattttttctcttcttttgcaggtgcttgttgtgttgtttgtgttgatgccggtgcctgttgtttcttatcaatatcttctttacgaaccacatcatttgttttcggacttacttcagcaagattcacaccattttcacgagcatatcgacgcgcagaaggcgtagcattaatacgttgctgattgtcatcatttgcttgattgacttcagctttatctaccgaattatttgttgtttcttcttttttattatttgtttcttcattttgttgtggagtattgtcgttactattttctttagaagcattgccactaccttcgccgatgatagcaattgcttgtccaacttctacagtgtcgccttcacttgcaagttgttcagataatacacctgcttcttcagatacaacttcgacattaactttatcagtttctaattcaagaatagcttcacctttttctacgctatcccctacgtttttcaaccattctgcaatggtaccttctgtaatagattctgctaattctggaactttaacctctggcatgacttatttccccctagttattttttaatgcattttctataattttattttgaacaagtttatgaatttctccatcgccttcagctggagcagccctttgaattctgccatgataacttaaatcatatttatctgcaactagcactttaacatatggatagacatataaccatgcaccttgatttttaggttcttcttgtacccatgacacttcttcaaggtttggcaattgtgctagtaatgcttcaatctcttcctctgggaatggatacaatctttcaatcgcaacgagtaacactgattcgtctggatttttagctaatgcttcttttaaatcaatgaacattttaccagttgctaaaataacttttgtaaccttatccgcttgatatgattctgtcaaaattggctcaaatccaccagaagtaaactcatcaattggtttggcaactgttttatttctcaataagctttttggtgacataacaaccaatggtcgcatttgttcagaatctaaactagctgcttgtgcacgcaataagtggaaataattacttgaactagataagttgacaactgtgcaattattttcagcagctaattgtaaaaatcgctctaatcttgctgatgaatgttcaggtccttgaccctcatatgcatgaggtaagaataatgttaatcctgaacgttctccccattttgagcgagaactgaataagaagttgtcaaaaatcatttgtgacatatttgcaaaatcaccatattgcgcttcccaaatattgaagctttttttgttttccacattatagccgtattcaaaaccaactactgctgcttctgaaagcggagaattgtgtatatcaaatgtcgctttttgatcaggaacatgatgtaaaggtgtatatgtttcacctgtttgctcatcatgtaacacggcatgcctatgactgaatgtaccacgttcactatcttgaccagttaagcgaatcggtgtaccatcttgtaaaattgtcgcaaatgcaagttgttctgcttgtgcccaatcaactaaaccatcttctttattaaacggctcatgacgcttctcaagaactttgtttaactttttcaaaatgttaaagccatccggatatgttaacaatgcatcatttatttctttcaaatgatcaaacgtaaatgattgttcgtctgcttgtaacggtaatgcaagttctgcaggtttttccatatctggattatccattttatcagctttattaattttatcatgtgcttgtcttagttccttttggacttgttctataaatgaatgcatttcatcttctgaaatgacaccttcattaacaagctttttaccaaacacatattcaacagagtcatgtttgcgaatattctgataaggaactggattagtaattgatggttcatccatttcgttatgaccgaaacgacgataacctactaaatcaataacgacgtctttatgaaactcttttctaaattccattgcaatatcaattgcttcaatagtagcttcaacgtcatcagcattgacatggaatattggcacatcataacctttggccacatctgtagaataagttgttgaacgtgcatcaattggttctgtagtaaatccaattctattgttagtaataatatgcaatgaaccacccgtagaatagcctttcaagtttcctaagttcattgtttcgaagttaattccttgaccaggataagcagcatcgccatgtataataattggcattgctttatgatgatcagtcgtcggagccccagcacgttgtgtatcatcttgtgctgctctcgtacgcccctcaacaacaggtgcaacaatttccaagtgacttggattgttagccagtgcaatacgctgcattgtaccgtatgaatcagtagttttaatgccaccaaggtgatatttcacatcaccagtccatccagcagttaactgcaagctaccatcttcaggtaagaatttcattggatctgtatgcataaattctgaaatcatcatttcgtacggtttttctaagacatgcgttaaaacgtttaaacgtccacggtgagccatgcctatttgtatatttttaataccttctttcgcagcaatcgtaatagtacgttgtaacatcggtacaagtgcgtctaccccttcaattgaaaaacgctttgcaccaacgaagtttttatgaagatatttttcaaacccttcaacatacgctaattgtttgaatagtgcccttttttcgttattatttaacgttactttatatggcgtttcaattcttctttttaaccaaccacgttcggtattgttattaatatgtgtatactcaaatgcaattggtcctttgtaacgtttttccattcttaaaattgcttcataagcattatcataaatgtcggcaaagtgatctgaaacaattcctgctgatataccttccaaagtctgttgatctaaatcaaagtcttcaatctctaatttaggtacatgtttcctttttggaggatttacaggataaatatcggctttaagatgcccgtattggcgaatattatcaattaaacgcatgacacgcttaattgtgccgtcgctattttgactacttgtactttttaaagctggtacaattgagtcatcattcttaattgtgctgaataagacttgtaaatcttctggtacagatgatggatcttgtaaaaagtcatcatatagatctaacattagacctaaattcgcaccgaagtttacaggagcctctgaaacttcttttctttcgttagtcattttacaccctccacaaaaatgttgaaacgcttacaatgtaataatatcactatttagttatttgttaaagtagatttacctatttatctgctaaaaagaagaatcaacaaaagcgttgattcttctaggtttatagatgtattttattgtaaattttgggagtacaacagaattgataaagaaccactgtttatttgttttatagttgttcttatacattagtcacagctagtgtgtacttaaaaaattgatcctatgactttgattgacgtctcagtcatgattaaaatatgattttaaacgttgttcctttgttaatttcacttttaattttaatcgatcctccgtttaattgaatgattttttgagcaatagataatccgagtccattaccgccttgacttcttgaacgagatttatccactcgataaaagcgatcaaaaatgaaatcttgatcttcctctggaataccaattccatgatctgtaatttcaattattttttgcttattttttaaccttgtcttaactttaattttcttattcttcacatcatatttgattgcattatcaataaagattaaaaataattgttcgaattgatgaggtttcattttaatttctagatttttagatgtcagatccgtatcaaattgataatcaggatgcaattgttttaatgagtgtattcgcgagcgaatttcatcattaatatgcacggtctgcgcttcagaagaaatgtcatttacatctcctttagtcaattcaagtaattcttcgactaattttatgatacgattcatttcttcaatagaaatatttaacgattcttctaatactgctgggtctttttttccccatcgctgaatcaaatttaaatgaccttgaataatttgtaatggtgttcgtaattcatgtgacgcatcttcaacaaattgtctttgttgattaaatgattcttcaatttggctcatcatctcattaaacgtatttgctaaattatctatttcttcataatttgtatttaattgcaatttattttgaaaaccatctcgtcgaatctcaatcattttatttgataaactgacaagcggtttagtaatttgtgttgaaaatacataactgattgtggcagttataattgttgcaatcactccaaatgcgagcgcaatgatatacaatgattttacgatgttatcataattttctagtgaatgaattaacaagctataccctttgaaatcttgcgttgtgattggttctttaataattaaatattcaatgcctttatagcgtttttttattacgcggtcaaaataccggtgttcatatccaggttcaactctcactgtgttatcattcgatgtctcaaataatttattattatgctcatcataaataataatctcttgaaaattacctaaagatgcattcaagtctaatgcagatatatctttaacaggcttagaatgaaataaattattaatatcgcttgagcttcgttctgcatcatcaagctcactattatgcagtgtatctttcaagaaaaagataataattaaacaaaacaaaaatatcgtgacaaacgtaatcatcgtggtaacaataatccagttattgcgcaatttacgttttgtcatcgtatcacatacccaacgccacgaactgtttcaatcattttgtcacgatcgtatggttttaacttgtttcgtaagtatcttatataaacatctacgacatttgtttctacttcactattataaccccatacatgatttaaaatttgttcccgttgcataacatggtttttattttcagctagaagatatagtaaatcatactctgtttttgttaattcaatttctgcgccatttaccgtcactttaaaagcgttcttatcaattgtaataccgttgacatcgataatatccttttgtggctgacgacgtaaaattgcacgaattcttgctaaaagttcttcaatatcaaatggcttaactatataatcgtctgcaccgtaatcaagcccagcaactttgtcatacgtatcacttttcgctgtaattataatgataggtgtagattgttgttgtctaattttgcgacaaatttctaagccattaattgacggcaacattaaatctaatatgattaaatcatagtaatggctaagcgctttatctaaaccgtcttgtccatcatactctgtgtccacattgtaattttcatgtgtgagttccaattcaagaaatcttgctaagttttgttcatcttctactattaaaatttgcgtcatttgtacacctcatattacgactttttctaataaggtaatatattttaaattttgtatttttctatacaatagttgctttttaaattagtttgtttacgtttaaattttatcacaaatcaataaccatgttttaaatttttcaagctacaatcattaattatttattaactcaaatatttaataatcagttaatggcattctgttaattctgattgcagtacttaaatatagaatactgtaacacaaggccttaccgcaatattaattgttgtcatatactgacttttcactattgtaaagtgaatagttattatctttattttcacaaaatgaccgtagtttaaacattttcacacatcatttcaatgtgcgattttgaacttggaagtaacatttcataatgtataaattcaaaaggagtatgtaaacaatataatttttaaacctcataacttttaaatattctaattctaatgagaaatacaaatttttttattttctaaaatagcgtaatcatgcgttttatttactattcttaaaaaatattcaaaaaaagttttagtttctaattgacaatgattctcactaatgtataatagtagttgaaaatgattatcaataccacatagaacatcccccccacaacgtttcgttcttgttggattggtcattttcaaatattccccttttatatgcccgtaaaagacaatatacgttataacaacgttttataaaagcagtaaacccttacgacactttaggtttactgcttttgtttttttactatttaatttattaatttatttctaagtaataacgttgataaaataatgcaaaatacgccaccaataatgccggcaataatatctgttggataatgtacacctagatatacacgtgatatggaaatcaataaaatcatagctgcacataaccctataagaataccttttgaattaccttgatttaatcgatttaatagatagataccacttccaaaatatgcagttgatcccatagcatgaccgctaggaaaactaaagcctgttatatcaattaaacgcagcaatgtaggtctttctctatcgaatatattttttaatgctggattcaaaattccagatagtgccattgttaatgcaaaaaataatgcttcaattttgtggcgctttaacatgagatatgccacaagaagtaatgaaatacataacattgcccagacttcacctactttagtagccccaagcatgatagatgtcgtaataaagctctctgatgaatatataaattcataaacttcattatcaatccatttccctagtcttgattcgtggaaaaacgcgataattccaaaaaccaatgtaaaaacgatgagcaaagagatacgtttccattgactcataaagcattaccccccattaattcaatgcatctttaatcatcttatcaaataaagcttctttcgtataactttgttcatacgatttcatattattgataattcgagttctttcctgttccatttcatttagttcttgtaataaaatttgtgctgttaattgttcttcatcaatcgttttagcataacctttatcagcaaaatgatttgcattgtcaatttggtcgcctcgggattgatctaaacctaatggtactaataacattggtatacgtaatgttaagaactcataaatcgcatttgatccagctctacttattactgtatccgtaattgctaataaatctgttaaatcctctttaacaaattcatattgtatatatcctgattttttaacttgagcatcttttaatcctttaccagttaaatgtatcacttgatattgttgtaataatgcatctaagttttcgcgaataatgctatttaattttttacttcctaagcttccacccataacgagtaaaacttttttattttcattaaagcctgttaattgataaccattatgtgcattaccattttttaaatcttctcgaattgttgctccaataaaatcagctttctctttaggtaggtagtttagcgtttcttcaaatgttgtatatattttcttggcaaatttaagtgctatcttattcgctaatcctggtgttaagtcagattcatgaataatagttggtatatttaatgatttggctgcaataacaacaggcacagatacaaatccaccttttgaaaataatagatcaggtttttcttttttcaaaactttacgagcatcaagaatacctttcaatactttaaatacgtctttggcattttctaaagaaatatatcttcttaatttaccactcgaaataggataatacttaatttctggtagttgtgattcaatcatttctctttcaataccatttttagaaccaatataaagcgcttcataaccttgtgataatgcagttggaattaaacttaaatttactgatacgtgtccaactgttccccctccggtaaatgcgattttcgtcattaatattacctctattcttttaaatttttataatatgcataaaatggttcacctttatcatatggcggatattccattaattgttcaccgaccttatgaaatccaaatttggcaaataaaccttgtgcaggtttgtttaacgcaaaggtgtccgttaaaataacttctgcaccacgtgctttaactacatcaataacataattgaataattctgtagcagctcctttatattctttcgaaccagttaatcgatgaataacaaaggcgccttctctatttactggccagtcaatgtcatcataccattctgcttggtcttggtcgacaacaataaagccataaattttgtcattttcctctaatacgtacaaataatctttagcaatatcttcttcaaaatgttctaaaagtgggtactgatcgtcccattgctcgttgtcgtgttctttcattaattcttttgcttcttctactagatttaagatttgatctaaatctgacattttacctagacggatcatgtacgtcactccttatatcattatgttaaacatgtttttcagtacatgttaatcttacacactattaacatgctttaaacctttattatgaatgaaaaatagtaattatcacactatgggataaaaataaccaataaaagtatcatataccaattaattgattgttaaaactagtgaataatactatttaaaaagtatatgctcatagtatattaaagcatgaattattaacagcaatgatagaaattgcgttatttacatcatttataaatgtctaatttatatcttttagagttagacgtcaataaaaataaacacgccgaggctgggacatacatccctaaaaaaagcagtaagataattttcaattagaaaatatcttactgctgttctctatttatacaatacttcgtattgaatggcttcgctttcctagggtgccgtctcagcctcggtcttcgactggcactgctccctcaggagtctcgccattaatactacgtattaacatgtaattttactttgaaatacttttaaaaaataagacactttgcccaacttacactaccaatagaaacttctgttagaattcctcaaaatgatatttcacgatatgttaatgaaattgttgaaacgatacctgatagcgaattcgatgaattcagacatcatcgtggtgcaacatcctatcatccaaaaatgatgttaaaaattatcttatatgcatacactcaatctgtattttctggtcgtagaatagagaaattacttcatgacagtattcgaatgatgtggttagctcaaaatcaaacaccttcttataaaactattaatcgttttagagtaaatcctaatactgatgcattaattgaatctttatttatccagtttcatagtcaatgtttaaagtaaaatcttattgatgataattcaatttttattgatggtacaaaagtagaagctaatgccaataggtatacatttgtgtggaagaaaagtattccaaatcacgaatcgaaattgaacgaaaattcaaaaacactatatcgtgacttagttgaagaaaagctgatttctatcaaataattaatagaaatcagcttttttacattgcctaagaacttaatgttccagcctgagcgtgtcattaacataataataatacaattttagtagtgtgtatcgcttattttaaaatattaatcaacttatcgagaacatcatcatgtttattagctttttcaactaataactcagtaaatttattattcgtttctttattaaattcaccagttacctcaagtttattcgcttgttggaaagctttaacttgattttctaaagctttatcaaattgcgttgattcattatcaactttataacctaaagctgataaaccaattttaatagttttaatatttttatcatcgtctccaactttaaatgttttcgtattaggaatgacatttaaagattgatatttaggtgtgtcaatagtaacgtctggtttaatgcctttaccgtgaatataatgaccatctggcgttaaccatttcatttcagtatattttaacaatgaaccatccttaaactctcttgtagtttgtacgacacctttgccgaatgtttttgacccataaactttagctttattatagtcttttagcgcaccagtaaacacttcagaagcgctagctgaaccttcattcactaagatggatatatccatgtctttcgcttcttttaacgcatcattagaagtttgaattgcttcagtatctttacctttttctagtttaacaacagtttttcctttatcgataaaaatatttgccattttaacagcttcatctagtagtccacctggattatttcttaaatctaaaacaatctttttcaaaccatctttgtgagcttttagaactgcatctttcaattcacctgatgtatcattctggaatttattaatagtaataactccaactttaccttttttcttatactcaacacttttaacatgaattttttcacgtttaatcttaacgtctttttcttcactacctcgttgaacagttaaagtgacttcagtgttttctttaccacgaacatctttgacaacttcatctaatgctttacctttaattgattttccatttactttagtaatgacatctttaggacgaatgccagcacgttctgctggagatcccttcataggactagtaaccataatttgatcatttttcttttgcatttctgcaccaatacctacaaaatcacctgaaacaccttcattaaaggatttcgtttgttcttttgttaaatattcagaataaggatcttttaattctttgaccatgccatcaattgcagctttacttaacttgtcagagtcctgttttttgtaataatcactatttaagattttatacacattttcaattttatttaagtttgcttgatcagttttgtttaaaccacttattttttgatttataaaaatatatgcaacaactgtgatgacagctgttattaggattgtaccaattaatattgatatgaattgccaacgttttaagtgaacgcgtttcgatgaattagtttcttggtcttgattgcttgttgcaatttcagcgcgttcatcatcggatgaagatgtgtgttgcttatcatccattgtatcacttccttattatgtattatgtacttttaaattctgtgtagttaatcatatcaatttatgcaagatagcgcaccatatttcactataattgattaatttttagtcacaacttagtttattttaaattaaaaccaggataacgaattgcatcaccctggttctaactattattattaaaaattatattaaaattttagccattccgtatattcttcatataaatcatcaaatacagacattggcaatgtgaaatcaccatgtgtctcaatataatcagacagtatgttaaaatcatcatcgtgttttgggaaagcaagatcgtcaaatatctcttctgctagacgacctttatcgtcgtgtcgaccacgaactgtcatgacaaattgataaaacgaatagtttttcattagttcattgtcacatcaatcacttttgtttcacctttaatcacagcattttcatcataaatattaattgaagctgcttgatcagtgttagtaattataattggtgaaattacagatttagcgttattattaatatattcaaggttgaatcttactaatggatctccgacgttaacttcgtcaccactagacactaacacttcaaatccttcaccgtctaattgaactgtgtctaaaccgatatgaactaataattctaatccgttatctgcttttaacccaatcgcatgcttagttggaaagacattgtcaacacgtcctgcaattggagacacaacttctccttcagttggattaataccaaaaccttcgcccatcattttttgtgcgaatacaggatctggaatatcttcaattttcacgaattctccagttaatggtgcataaattgcgatatctttctgaacttctttgccttttccgaataattttttaaacatactttccactcctacttatcaaaatgtgatattaaatcgccataacccaattcttctaacttttcatatggaataaattgaattgcagcggaattgatacagtatcttaagccgccactttctttaggtccatcattaaagacatgtcctaaatgactatttgattcttctgaacgcacttcagttctcaacataccaaatgatttgtcgactaattctataatttcatcgtcatcaagcgctttggaaaagctaggccatccacattcagaatgaaacttttcttcagatgtaaataaaggtttaccagaaattttatctacataaattcctttagcaaaatgattccaatattcattcataaatggtggttcagtgccgttttcttgtgtaacaatatattctatatctgttagttcacttttatcttttttaagcattttgattcccccaatgtgattctataaacgcttttctacctgaaccacgttgatattggtaataatgtaccgggttctttttgtaataatcttgatggtagtcttcagctggatagaaatttttatatggtttaataggtgtaatcactggtttcttgaaaataccttgttcatttaattgttgctttttaaactcagcagcctttttctgatgttcatcatgatagaaaatgactggttgatagctttcgcctctatcgaaaaattgcccttgatcatcagttgggtcaaatgttttgaaatatatgtctaatatattttcaaaggaagtaacctctggatcaaacgtaatttgtactgcttcgacatggccggtttgattcgtacatacctgttcataagttgggttgtcaacatgaccgccactataaccagatacgactgacttgatgcctggatatgatgtaaatggtttaaccatgcaccagaaacatcctcctgctaatgttgcatattcttttgtcatatgaattacctcctctatctatctaattataaatttagtctataaaggattgaaatggaagtaattaacactgaaaagattaaatttacttcttaaggactacgaggccaatcgcaccttgaccagtatgtgcagaaataactggtgtagttacatttatatcgtaattattcacatgaaaagcttcattaaaaactttcttcaatttatcaacatattcaatgacgttagcatgtgcgacaccaatggatttgatttcatgatctcctataaattcagcaatttcctttttcaagtattggatactagaattttgagttctcgcattgtgcacaagctctaagcgaccatcatctagtgtaccaattggtttaattttcataagattaccaatcaaaccttttgttttactaattctgccacctttaattaattgattcaattgccctataactacaaataatttaatgttttctcttaaatgatttaactttttaactatttcagaagttgagacaccttcttttacaagctctactaggtgttgtatttgataccctaaaccaaaagaaatagattttgaatcaataacagttacattagcatctaccatttgacttgcttggtaagcagtgttatatgtaccacttaatcctgaagaaagatgaatacttatgatttcagagccatcttttcctagttcttcataagcagatataaattcacctatggctggctgacttgtctttacatcttcatcattttcaatatgattaataaattcttctgatgtaatatctacttggtcaacgtatgaagctccttcaatagttaaacttaaaggaattacatgaatgttgtttgcttctaagtattctttagataaatcggatgttgagtctgttactataatctgttttgtcatggtcgttttcccccttattttttacgaattaaatgtagaaaggtatgtggaattgtatttttctcatctagtttaccttcaactgaagaggcaacttcccagtcttcaaatgtataaggtggaaagaacgtatcaccacggaatttaccttcaataacagtaatatacatgtcgtccactttatcaatcatttcttcaaataatgtttgccctccaaatatgaaaacatggcccggtagttggtaaatatcttcaatagagtgaattacatcaacgccctctacgttgaaacttgtatctgaagtaagtacaacatttcgacgattcggtagtggtttaccaatcgattcaaatgtcttacgacccattactaaagtatgacctgttgataattttttaacatgcttcaaatcatttggtaggtgccaaggtaattgattttcaaaaccaattactcgttgcaagtcatgtgcaactagaatggataaagtcataattatcctccttcttctatcatttcattttttattactaagttatctttaatttaacacaatttttatcataaagtgtgatagaaataatgattttgcataatttatgaaaacgtttaacacaaaaaagtacttttttgcacttgaaaatactatgatgtcattttgctgtctatatggttagctaactatgcaatgactacactgctattggagcttttattgctggatgtgatttatagtcaacaatttccaaatcttcataatttatgtcgaaaatagacttgtcactgttaatttttaatgttggaggattgaagctttcacgtgctaattgtgtttgaatcgcatcaatatgatttgaataaatatgtgcatctccaaatgtatgcacaaattctcctacttcaagtccacattctttggcaataaggtgtgtcaataaagcgtagcttgcgatattaaatggcacacctaaaaagatatctgcgctacgttggtataactggcaacttaacttaccatcttggacataaaactggaacatggtatgacaaggcggaagtgccattgtatcaatttctgttggattccatgcagatacgatgtgtcgtcttgaatctggattatgcttaatttgttcaattactgttttaagttgatcaaaatgattaccatctttatcaacccaatctcgccattgtttaccataaacatttcctaaatcaccgaattgcttcgcaaaagtatcatcttcaagaatacgttgcttaaattgtttcatttgttctttatattgttcgttaaattcaggatcactcaatgcacgatgcccgaaatctgtcatatctggaccgttatactcgtctgattttatataattttcaaaagcccattcgttccaaatattattattatattttaataagtattggatgtttgtatctcctttaatgaaccataataattcggttgctactaatttaaaagaaactttctttgtcgttaatagtggaaatcctttagataagtcaaagcgaagttgatgaccaaatttcgaaatcgtacctgtatttgtgcgatcatttcgtgtatttcctatttctaaaacttcttcacaaagactgtgatatgctgcatcaaatgaattcaacatatgcgataacacctcattttcattatttatagtatgtatatttagtttgatataacttaattttatgtagcattttgttatcactcattttaggaatatgatattaatatcatgaattccgttactttatttataaaatgctgattaagtacctaccacatcgtaacgtgatatatgtttccaattggtaattgtttacccaaatctataactttaatgctaaaaaattttaaaaaagaggttaacacatgatttgaatattatgtttgatgtcctattaaaacagttaaatttctagaaaatatagttggtaaaaacggactttatttaacaaatagaatacaactatattctctattttcaatgacagacaccatttttaatattataaaatgtgttaacctttatatttatttatgtgtactatttacaattttcgtcaaaggcatcctttaagtccattgcaatgtcattaatatctctaccttcgataaattctctaggcataaaataaactaaatcttgacctttgaataaagcatacgaaggactagatggtgcttgctgaatgaattctcgcattgtagcagttgcttctttatcttgcccagcaaaaactgtaactgtatttgtaggtctatgttcattttgtgttgcaactgctactgcagctggtcttgctaatccagctgcacagccgcatgtagagttaataactacaaaagtagtgtcatcagcatttacttggttcatatactccgatactgcttcgctcgtttctaaacttgtaaaaccattttgagttaattcgccacgcatttgttgcgcaatttctttcatataagcatcatatgcattcatatttaattcctccaattaaattgttctgtttgccatttgtttccatactgaaccaagtgcctcatctccgttttcaatacgagatatggccatttcaatttgtaatttaacttcaaacgcattgtcattaatatgggcttttagtgcgggaagctgctctgcattaccttcatcaaagataaacatagcagcacgccacctaacgattttctgtggatcatctaatagtagcaccatttctggtagtgcctctggataccctaaatcgcttatgcaatcccctgctgttcttcttacagcaggacttttatcacgaagccccttatataaatacggtaaaatttctttactttcaatcatacctaataatacaatcgcttgacgtctaaccggtactttttcatcagataaagctaaatcaagtagcggtatatcttcaaaagtcggctttggaaaatggtttaacattcgtaatcgagtcttccaattatcagttgcatgatattcatccaaagagacatgtcgatagaaatgataattattagttgcgtgattttcttctaaagcatgttttaccaatacgggtaactgtgattctggataggtagctagcacttcttctaggacaccatccattacttcttcaatatttccatagcgatttcctaaatctagccatttacgcataaaaacaatattgtcatgtgctgtttgcgcttgagtcatatgatcaacatatgtttgtggtaattgttctcttaattcttggtcagcagaagttagcttaatttgatacggtatacccttaaaagttaataattcagctttaatttcaccaaaatgattgtcaatttgaggttcatttacagattctaaaaccttattcgcatcagaaaaagcagctttaatatcaggtaatatgacttcccaatcagcttttggtgccttatcaacagctaagaagttcatgacatgaaaaatggaagtgataccatctatagataacaactgatttataaatcttggttgtgtttcttctacttttttataagtattagataacttgtcttctcttgtatatgacaaaacaactttcattgtatttggacttggtgttggctctatacgtaaaatttccatatactttattccccccgaatactagttgatgaaaaatttattcgaatacagcctctacttttggcaatactgtttcccaatttgcgtcattttctttatctactgaaataaagtccataacatggaaaattgatttaacgccttcaacctttaagatgtcattaataaatgctggctgtgaatcatcaactttagtatacgtatctgatgtcataccttctctgctttcactaagtgtaatcttcattgtgttgtggttcggtgtttctgatatagatataattttcatttgacttcctcctattgaagttcatttcctaattgttttatttctttccctattgaacactcattgatacaaaaatgatgcgccttcgttttcccctctaatttacgcagacgagttttgattggacattgattgcaataagtattcattaaatcatctattttcgcgagtgcattttgctctgaaaaagttaaaatacgcgacacttcctttattacttcaaaatattgcaaccttgtaaataagtgttactgttttaaatttgacataaaaatattataacatttttgaccctaagatttgaatgaaaccttttacaattctatacgtaaaatgtatttatattcaaatgctattgcatcgcaaacgatttttcagtaaaatgagtaagttatttattgagcggtttctaaacacccgcatgatcaaaatttaggaggacattttaatatgtataatgaaattttaggactagttacgtttattgcaacgttcgtacttatggtacttatgtatcgcttttttggtaaacaaggtttaattgcatgggttgcaattggcacaatcattgccaacatacaagtgattaaaactgtagaaatctttggtatttcagcaactttaggtaatgtcatgtttgcttctatttatttagcaacagatatattaaacgatatttatgggcgtagagttgcaaaaagagcagtttggttaggcttttcatcaacattaattatgattattgttatgcaattgtcattacattttattcctgcaccagaagatatggcacaaaaagcattacacgcaatctttgatgttgtgccacgtattgctttaggctcaatcgtcgcatatattattggtcaacatattgatgtatttatcttttcactaattaaaaaagtatttagttctgataaaacgtttttcatccgtgcatatggtagtacatttttaagctcaataattgatacagctttatttgtagctatcgcttttatcggaagtttacctggtacagttgtatttgaaatatttattacaacttacgtattaaaattagcttcaacagttttcaatgtaccatttggatatattgctaaatcattttatcgtaaaggtaagattgataagttagatcaaggctattaacgcacttactacacaaaagaataagttttaagggagtgggacagaaatgatattttcgcaaaatttatttcgtcgtcccaccccaacttgcattgtctgtagaaattgggaatccaatttctctttgttggggcccatccccaacttgcacattattgtaagctgacttttcgtcatcttctgtgttggggcccacaccccaactcgcattgcctgtagaatttcttttcgaaattctctgtgttggggcccacaccccaactcgcattgcctgtagaatttcttttcgaaattctctgtgttggggcccctgactagaattgaaaaaagcttgttacaagcgcattttcgttcagtcaactactgccaatataacttcgtagagcatagaacattgatttatgtcccagcctgaagatgatttttttaggaagtatattacagtactacgtattagaaaatcatcttttaatcagcgagtattttaaacacgtgttacttatttaagtgatgcgtgttttttaatggattatccaacatattttgtattacagtaatagtaactttaactaagtattgaatagaaagtaggtttattatggcgaaaataaattttgatgctgcgacgaaaggaaatccaggcataagtacatgtgccattgtaatcaaagaagatgagcagcattatacatatacacatgagttaggcgaaatggataaccacactgcagaatgggctgcttgtatctatgcattgaaacacgcccgtgaattaaacgttagcaatgcgttgttgtacactgactctaagttaattgcggatagtgttaacgctggttatgtaaaaaatgcaaaatttaaaccttattttgatcaattggaaatatttgaacaagattttgatttattatttgttaaatggattccgagagaacaaaacaaagaagcgaatcaacacgcacagcaagcattgtacaaattaattaaaaagaacaaataaaaggagcaccgactgacataatttcaatcggtgctcctctttttatcgaagaaacaaattactttttattttttttagatttctttttcttctttttagctgctagctttttagaaggtttttttgatgccgactttttccctttggattggttatctttttgatttttctttttagccaataataaaggtgcgtcatcttcattagattcaatactagttgttgtttcaacatctacctctttatctttgcgtcgttttgcgattaagattggtgaatgttcgttatcttgcaacactttttcatctgtgttttcatttgtaacttccacatcttcttcatcttctttacgacgacgttttggtaagaagaacggcgtatgtttaactttatcgagtgactcgccattatttagcgaatctttttcttcaacagtaacatcttcttcatcttcttttctgcgacgtttcgcaaataaaagtggtaaatgttttgtatcgtctaaagtctcttttattgaatctttattattatctcttatttctaattcttcctcttcatcttctttacgacgacgtttggcaatgaagaaccagaaactagctagtaagccagagatacccaccacaccaatagcgtttttaataacattaccgaaattattactaaagtgacgcatatgaagtggatcaatgtcatcatcttcatcaattttctttttatgtccaatagtcgaactgttaaatggatgatttgcagttccataaccaattgttaaatggctattagattcatttccagtacttgacgattgtttagcacgatcagatattacaatttgtactgctgaaattcgagcaataccattgttcaatgcagcctcaacttgctgtaatgtatgcgcattattaatatctctaattgtttcaagcacaatttcgttaatttgattcattgctgcttgtttttcatcagttgtgccaatttcactatttcgaatactatttattttttcatttgaaaagtctttaattctactaattgcttcttgcttgcgtttagctagttcttttgctgttggattagctgctttcatttgagctttaaattgttccaattgctcacttatttcatcgatgctttgcgcacgttgaatcgcttgaattgcttgttcttttaattgatttaacttagcaatagcttcttgcttctctttatctgttagatcagtacgagctttgatttcatcaatcatatgttgaattgcatcttcaatcgatttaattgcatttgattttgcttgttcaatcgtaaattgttctggattaaattgttcaatatgcgcttgttcttgttgttgaatttcttcaactgaatgaacatcaggtgcattgttaatataatcaattgcttgttgtttaagcttattaacttctgcaattgcagcttctttttgttccagtgttaatgtcacactattattgatttcatcaatcttttgttgtgccgcattttcgattgattcaattgcctgttgtttgactactgacaattctttttctacaacttttacaggaacattaacaatcacttttgatccatcaagcaatgtaacttcaacttttgctgttaagctatcagaaatcgttgcagttgatggtgtatcgataacttctgctgaaagctgatcaattaagtttatgtgtgcaagaatatcttgttctgtaatgatgtcatcacgatgtacaatgagttcaccattaactaggatttgctcaggtgttgcttcaaaaatttcatttacagcaggttgttcatcaacctcccatacatgtgtatttctaatgtcatctaaacctaagtttaatcctcgatttaattgatctatagtttgagcattctcaacgttttgtagtgctcgtttttcagcttcgtcaatttctttgagcgcttttgctttttgctcaggtgttaaatctggatttgaattgatttgatcacgcttcgcattagctaaggcttttattgcatttttcgcatcttctttagctttcactaaatctttgatgtcttgtaatgcttgcgcaagttgtgcttttgcctgctcaatttcttctttagtcagcgcattgttaatgtcgttatgaccttgttgaagtatttgattaattcgatctttaagtgcttgtttttccttatctgttagatttggattttgatcgatttcgtcaattaaagcttgtacacgtttatcaatatcttgtttcgcattttctttagctttcactaaatctttgatgtcttgtaatgcttgtgcaagttgtgctttggcttgttcaatttcttcttttgtcatcgcattgttaatgccgttatgaccttgttgaagtatttgattaattcgatctttaagtgcttgtttttccttatctgttagatttggattttgatcgatttcgtcaattaatgattgaacttgcttatcaacgtctttattggcatcaattttagcttttggtatttcattggcatgcacttgttcaatcgcgtggttgcctgctgtttgaacttgagatacagcctgattacttgttgctttattaatgttgttgatgatgctgtttgccaattcttctgctttatttttcgcaatatgcttgtcttgatccgtcgcatttgaagcttcgatttcttttagcttattagctaaagcttgattaatagattgaattgccttgtctttagcatcttgtagtcgttgatcaccattaagattatggattgcatcattgactgtttgaattgcgccgttaatatcattcacatttgtgttatcactatttagcaatgtatttgctagacgtttggcatcatcgaagtttgttttagcattatcgtcagcgttttggtaattgacagtttgctctgcatttggaatttcattgtcaactaaatgtttcaatgtttccattgcatcatttaagtcaatttgattattaacaatatctgttacatctgatacagtatcggcattgttaattgctttatgtgcaagatcttgttgctgttgatttaatccatttaacgaattaacaaacgcatttgctttatctttggcatttgcaaggttttggtctccatttaatgcattttgagcatcgataatattttgtttcaattgctctgcttcagcttttgcaattgcattaccttgcactttatctaactcatgtgctgcattcgcaattgcattatcataatttgctttcaaattgtcatctgcattgatgtaatttgtgctgctgataacaccaaggtgctgttcgtcaatatattgttgtactgcacccattgcattatctaatttagttgctctattaattgctcgagatgctttatttagcgtttcagcattattaatttgttggattgctaattgtctttgagcattgtttagatgtgttaattgatccaatctttgtaatgcttcagacttacgattattaagtctttcttcaccatttaatgcctgtttcgctgccgttactgcatcatttaatttgataacttgttctgcagttaagttttgaccagtcgatttatcaagtgcttgtttcgctttatcaaccgcttcatcatatacttgtttgacttgtgtatctgcattgacatagttcgtgctacctttcgtgcgtccttcattgccagtgatttcttctgacaattgatccattgcacgattaagtgccttagcctcatctacaatttgttggatttgatttaaatcgtttgattgatcgatgcgacctttaaatccatcttgttgagcattgtttaatgcattcaattggtcgatgtcatgtttaccatttgttttagcaagtgctacacgttcatcaccatttaatgcttgttttgcatttaaaatattttgaagtgcttgatccacttgttgcttattcgcattttgtttcaatacattttcagcatcagcaatcgcttgtttataagccttttgcttatctgaatctgcttgcgtgtaatcaactgtttgctcaacatttgtatgatcattaacagcttgttgtaattgatccattgattggttcaattgcgttgcttgatctactaattcagcgattggttgaagttgcgtcgcttgatcaatgttttgtttagcagttgcgatttgatcagcatttaaatgtgttaattggtcaatagtttgtttcgcttgtgttttagcttcagcgactctctcattaccatttaactcattcactttttcttgaagcttagttaatgcttgttctacagcgtctttattcgcatttgaaccattagttggatctgtaatgctttgtgcagcttgtaacgcttgatctactgcttcttttttatcagttgacgcttcagtgtaatttggttgagccttatctgtattcacttgatcaactttatttttcaatgtttccatcgcgtgatcaagttcagtagcagtttgaacatgttgtgcaacctctgttcttgtaggcgctgcatttatagcatcagttaaagcttgttgttgagcatgatttaagtttggtaatgcattaacagtcgttactgcttgttgttgatcacgagcaagtttttgatcaccatgtaggttatcttttgcagttgttactgcttgtgttaattgttcaacttgtgctttatcgagtgttggattacctgtttggttaattaaatctttggcttgttgtactgctgcttggtatgcatccttttgtggcttatcttcattgataaacttgctaccagattctgtttgttgttgatcttgaatactattacgtaatgcttccattgcttgattaagtgcttttgcttcagctaatttttgtgctacttgatcacgagttgctgcgttgtttatttgactttcaagtgcttgacgttgcggattgttcaaaccatttaattgatttaaatcagtaaccgcatgttgtttatcgtctgcaagtttttgatcaccatgtaagttatctttagcttggttaacagcttgtgtcaattgttcaacttgtgctttatcaagcgttggattgctagtttgattaatcaaatctttggcttgttgtactgctgcttggtaagcatctttttgcggtttatcttcattaataaacttgctaccagattctgtttgttgttgatcttgaatgctattacgtaatgcttccattgcttggttaagtgcttgtgcctcagttaatttttgtgctacttcgccacgagttgttgcattattgatttgattttctagtgcttgacgttgtggtgtattcaagttagacaagttatttaacgtttctgttgcacgttgcttatcttgagctaatttttgatcaccatgtaagttgtttttagcatcagtcactgcctgtgtcgcttgatcaatgattgatttagctaatgtaggatcagttgttttgttaatcaaatctttcgcgtgttgtacagcttgcgtataagcatctttttgtgcttgatcttcattaataaatttactacttgcttcagtttgtggttgatctttaatactttcttttaatgctttcatcgcttcatttaatgcttgcgcttgtgcaatgatttcagccactttatcacgagttgttgcattattaatttgattttctagtgcttgttgttgtgctggtgttaattgatctaaatgatttagagaatttccagcagtttgcttatcttgcgctaatcgttcaacaccgtctaatgcatttttagatgatgttactgcttgtgtcgcacttgttacattacctttattgatagttggattatttaatcctgcaatgatagactcagcattttgaactgcttcatcatatgcttgttttttattcggttctgcattgacatatgcactgctcatacgtgttgcatctttgtcagcaatactttgttgcaatgcatccataagttgatctaatgcttgtgcttcagtcaaatcttgcttaactgctgttctagttgtttcgctatcaattaacgtatcttccatatgtttttgtgcattgtttagatgtgctaattgactaaccgtttgtttagcatgatctttatcattttgtaatttcacatcaccatgtaatgctgctttcgttgtattcacagttgccgctgcttgattaatcgcattattatctaatgttgcagtttgttcattgataatattatttgcggcttgaacagcttgatcatagttttgttgctctggttgatcttcgttgatatatttgctatttgctttagttgctgcgttatcttgaatgctctgtcttaaaccatgcattgcttggttaagcgtattcgcattttgttcaatttgatgaactgcagttactaaagttgcagctgtaacttggtcttttaatgctgttttttgaggatcatttaagcttgttaaagcatcaattgcttgcgtcgcatttgttttagcaacttgtaaattatgatctccatttaacgcttgaagtgttgtttgaactttagtaatagcttgttctacttctatttggttcgcattttgaccagtttgtttgttaatcattgctgctgcttcatttaccgctgtattataagcagtttgtttatcagtatcagcattgatgaagttaccacgttgttcaacggcttgttgatctgcaatcgcattaattaagttacccatcgcagtatttaaagattctgctgtttgtttgtgaccattaactgcagcaatatcagatgattgcgtaatttgtgattgtaactgttgcttttgcgcattattcaaatgatctaattgatcaagtctattgttcgcttcttgcttagctgctgcaaggttttcatcaccatctaatgcaactttcgtattattcacttgtgtcgttgcaccattaacatcatctggattcatcgtaggcgatgtagtttgattaatgatattattagcagctgttacagcttggttatagtcattttgtctttgcgcagttgcatcatgataatcttcagatgctaatgtcgtttgattatccgcaacactatttcttaataattccatcgcatgatctaacgtttgtgctttttgattaatcgtagtgacatctgtaacaagtggcgcttgtgtaatttgactttcaaatgattgtttttgtgcatcatttaagtgtgttaagttcgccaattgttgttttgcttgttgttttgcatttgccaaattgtcattaccatttaatgcttgtttcgctgcgttcacttcattagtgatgctttcaacttgtgcttgtacttcattagtaccactttgtttattcaataatgcttcagcttttgctactgcctgtttatacgcattttgtttgtcaggatctgcatttaagtaattaccgtccgctaatgtttgagctttatcattaatagcttgtgataattgatccattgcatgatctaggcttgttgctgtttgtttaacttggttcactgtagcaatttcaggcgattgatcgatttgaccttttaatgcttgtttttgagcatcgtttaaatgcgtcatcccacttacggcatctttagcattttgcttttcagttgccaatttagcttcaccgtttaagccatttttagcatcagtcacttgagttaatgcacgtgttatttcatctgggttaagcgttggatttgtcgtttgattgataataccttccgcttgagacactgcatttgtatatgctgtttgcttatcggcatcagcatcatgatagttctcacttgctttgacagtatctttgtttgcaataccttgtttcaagttactcattgctgtattcacattttgtgcattttgtttagtttgttcaactgtagctaacgcttgtgcttgattgatttggttacgtaatgcatcacgttgtggttgatttaaatcgcgtaacgtatcaagatttgctaaagcatcctgtttcgcttgtgctaatttttcatcaccgtttaatgcatctttcgcttgattcatagttgtaactgcttgtgttactgtatcaggcgtcaatacaggtgttggtgtgccatttgcgatttgttgcgcttggttagctgcattgttatatgcttgttgtttgtcttgatctgcttgtgtaaagtcaactgattgtggtacttgactgtttgcttgaatttgttgtttcaacgtacccattgcattatttaacgcatcagcattttgcttaatagcattaacacctgtaacaagatctgcatgtgatacttgatcttttaatgctgatttttgtggttgatttaagtttggtaaatgatcgattgctgtattcgcattgtctttagcaacttgtaagttatggttaccgtttaaatcacccttagcttgagtcacttgttgtaacgcttgagccacttgttgtggatccacgtttgcatttggtgtaccactaatgatttgttcagcatgtgctaccgcattgttgtaagcattttgcttatcagtatcagcattgacaaagttaccatttgctttagtttggtctttatctgcaataccttgtttcaattgtgtcattgcttgatttaaatcttgtgctgtttgcttaatcgtgtttacatttgcaacagtttgcgcagcatcgacttgttgttttaatgcatctttttgcgcttgatttaaatcatttgcatttgtaattacttgtttcgctgcatcttttgcacgttgtacattgtcattaccattcaatgattgtttcgcttcgttcacacgttgcatcgcttgttccacttcagtttgacttgcattgctgccatttgctttagataaaataccttctgcatgtgaaaccgcattagtataatcatctttcttagcttgatctgcatcagtaaagttaatgctatttaatgtctcagttttatcttgtaatgcattgtttaagttagtcatagcattattcagattttgagcattttgcttaacattattaactgttgcaatatctggtgcttgttcaacttgagttgttagcgcttgtttttgagcatcatttaaatgatctagtgtaccaagtgttgtcttagcatcttgtttggcatcagctaatttttgattaccgttaagtgcttgatttgtgtcattcactttagttaatgcttgttgaattgtatttggatccattgttggatttgttgtttgttttaacaattcttctgcttttgttactgcattatcatatgctgtttgcttgtcagtatcagcatcgtgatagttctcgctacctttaatttgtgctttattcgcaataccttgtttcaattgtgtcatcgcgtcattaagcgttgttgccgcttgttgaatagcattgacgtttggtacaagtgttgcttgcgtgatttgtttgctgtattcatcacgttgcgcttggtttaagtttggcaattgatcaatagcatgttgaacattttgtttcgccgttgctaagtttgtattaccatttaaatcatttttagcttgcgtaactttatttaacgctgcagtaatttcgctaggtgtaacgacaacatcaggcgtaccactaattaatgcttcagctttcgctactgcttgattatatgcattttgcttgtcagaatctgcattgacaaagttaccatcagcttttgtttgttctttatctgcaatgccttgttttaattgtgtcatcgcattgtttaactcttgcgccgtttgtttaacattgtttacaccagctacagtagttgcattttgtacttgttgttttaatgcatctttctgtgcttggttaagatcattagagttattaattaatgctgttgcttcgtcttttgcatgttgaacgttggcattaccatttaatgcttgttttgctgcatttacttgttggattgcttgttcaacttcagtttgtgttgcattaccaccattagcttttgaaatgatattttcagcatttgtaactgcagtgttatatgcttgttgttttgcttgatctgcatcagtgaagttaactgttgctttcgtagcatctttatcagctatcgcttgtttcaagttacccatcgcagtatttaagttttgcgcattttgcttaatttgatttgcttcatcaacagtatgcgcgccattaatttgattagtaacagcttgtttttgcgcattatttaagttgtctaatgtacctaaagattgcgttgcttgttgcttcgctgcctctaagttttcattaccatttaaagcatttttagacgtgcttacttgtccagcagcttgattgataacagtcggatctaatgaagggtttgtagtttgatcaataataccttgtgcagttgtgacagcattattgtacgcatcctttttattcggacttgcatcagtataattttggttttgttttgttgtcgcattatctgcaatactttgacgtaatttgtccattgctgcatcaacattgtttgctttttgttcattaccttgtgcttctgcaacagtagtcgattgttgtaccaattgttttaatgcctctttttgtacatttgttaaatggcttaaaccgtcaattgctgtatttgcgtgttgtttagctttttcaaggttttgagtaccattaagcgctgctttcgttgtattcacttgattcatagctgcttcaacttgatctttaggcacgtttgtacctgtagatttatttaaaatattttcagcattacgaaccgcttcattgtatgcatttttcttctctggatctgcatctgcaaagttttgactactaagtgtagtgtctttatcattcaagctatttttcaagttacccatcgctgtattcagttcctgagctgtttgaatggcttgcgttacttcagctacagtgtgcgcttgattgatgtttccagtaacagcacctttttgtgcattgtttaagttatctaacgtagataatgtttggtttgcattgtttttagcatctgttacttttctatcaccattcaacgcttgtttagtagttgttacagttgaaagtgctgcttcaacttgtgattggatcgcatttgtaccatttgcttgattaataatattttcagcagcagttaccgcattgttgtatgctgtttgtttttctggatctgcatctgtaaagttaacactttgtttcacttgatctttgtcttggattccgttgattaaacgttccattgcttgatctaattgttcagctttagttttcacttgatttactgtgctaatatttggtgcatttgtcacttgtgtatttaaatcttgcttttgagcattgtttaaatgacttaatcggttgatgttagcagttgtttcttgctttttatttgctaagttttgcgcaccattaagcgcagttttgttagtgttcacttgattagctgcttgtgttactgcagatggatcaagtgttggctgactcgttgcattaatgatattttcagcacttgtaactgctgtattgtatgcattttgtttatctgtatctgcatcaacatatggttgactcgcttttacttcatctttattcgcaatactatttcgaagttgattcattgcattgtcaagatttgttgcattgtctttcacactttgtacaccagttacttgtgtcgcgctatcaatttgaccagtaatactttgtttttgtgcatcagataaatgtgtcatttgacgtaatgcatctttagcttgttgcttcgcagttgctaagtttgtatcaccatttaaacttgtttcagcattattgacacgttgtgttgccgcagtaacatctgctgcatttgtaatcacattaggtgaaccatttacgatattcttcgcagcattatatgcatcagtgtaagcaccttgtttatcaggacttgcgttagtgtaattaccaccagctacaattgtgtcatgatcaccaattgcttgttttaattgatccatcgcattattaagtgatgtagcactatttttcagatcagttacacctgatacgcgttgtgcagcattcacttgttgtttcaatgctgttttttgcggtgtattcaattgtgtcaagttatcgatagcttgtgtagcttcagttttagcgcgttgtaagttcgcgtcaccgttcaaagcattttcagtagacgttacactttgaattgcttgttcaacagcttgcttatctttattcgtaccatgatctttatttaagtaagattcagcttgtgtgatggcattatcaaatgctgttttcttagttggatctgcgtcaatgtagttttcgctcgctttagtttgatctttatttgcgattgctgactctaatcgttgcattgcaccatctaagtcttgtgctttcgttttaacactatttacaccgttgactgttgttgcaccttcgatttgtgatgttaaatcttgtttttgtgcattatttaagtgtgttaatgtacctaagtttgctttcgcatctgattttgcttgtcttacatttgcatcaccgtttaaagcattcttagcagtcgttacttgatttaatgcagcttcaacttgtgcttttgtcatattttgaccgtttgctttatctaaaataccttgagcattcgtaacagcatttgtgtaagcatctttctgaccttggtcagcatctgtaaagttcacttgttgtttaacagtgttttggtcattaataccattttgaagttgacccattgctgtatttaattcattagcagtattttgtgcagcagttacgtctgctactgtcgttgcattgtcaatttgactagttgctgcagttgattgcgcgttattcaagttactatatgaagctaatgcacgttttgctgtttctttcgcttgagcaactttattatcaccattcaagtcgtttttagcttgattcaattggttaagcgctgcttgaacttgtgtttcattcgcgttactgccatttgcattagtaattgcttctgcttgtgtaactgcagtatcatacgcttgttgttttggttgatccgcatctgtgtaattgacactacgtttcgtattatccttttcagcaagtgcatgtttcaaattacccatcgctgtgtttaacgatgttgctttatttttagccgctgtgacagctgcaagatttggtgcttgatccacttcagcatttgccgcagttcgttgtgcattgttcaagtctgtcaaacgaccgatatctgttttcgcagtttgttttgcagctgctaatttttcatcaccgttcaatgctgacttcgcactattaacttggctcgctttttgattaatcgtatctggattcatttcaggattattcgttgcactaataataccctcagcatcagatactgcatggttgtatgcattttgtagatctgcattcgcgtcttgataatcttcgcttgatttagtcgtatctttagaagcaatactttgtcttaattgattcattgcttgatttaaagtaccagcatttgcttggatgccttgaacaccagcaacagttgtaccgcgttcaatttgttctgttaagtttgctttttgagcattagttaaatgtgacattgtcgctacttgttgtttagctgtgttcttcgcttcatttaatcgcgcgtcaccatttaatgctgttttagcagtattcacacgttgtaatgcttgttcaacggctactttattgtcatttgaaccagctgttttatctaataacgttttagctgctgttacagcatcattgtatgcagtttgtttatctctatctgcatcagtatatttctgagctgcttttgtagctgcttcgtcattaataccacgttgtaagttgctcattgcagtatttaattcagatgccattgtagacacttgatttacacctgcaactgttgtcgcaccttcaatttgtgatttcaatgctgctttttgtgcattattaattgatgtaaggttattcaatgcatttttcgcagttgtcttagcgttcgcaacattttgattaccgttcaattcgtttttagcacgttgtacattttgtaacgcagtttcgacaccgtcttttgcagtatttggaccttgtgctttatttaaaatttgttcagcttgcgtcactgcatttgtatatgcattacgtttcgcttcatctgcatcagtgaaattaacaccttgcttaatcgtattttgatcttgaataccatttttcaagttcgtcatagctgtatttaatgcgtccgcattattttgcgcttgtgttacttcattaacatgcgttgcaccttcgatttggcgtttcgctgcatctttttgtgcattagttaagtcacttaagccattcaaatgttgcttcgcatttgtttgcgcagttcttaagttttcttgaccatttaacgcttgttgtttagctgtcacttggtctttcgcttgattaatttcttgcgcattcattgatggactagttgtttgaccaatgattgcttttgctgcagtgactgcattgttgtagtcattttgtttgttttgacttgcatctgtgtagttttgatctgctttaatcgttgcttcattcgcaatgctatctcgtagacctttcattgcagtgtttaatgtttgtgcattatcacgaacagtttgaacatttggcaacgtcgtcgcttgacccacttgttctttaagttttgctttttgcggaccatttaaagaagttaaaccatcaattgctgtgttagcattttgtttcgctacttctaaattatgattaccgtttaactgcgtcttcgcattcgttacttgcgttgctgcatttgtaacatctgatggtgttaacgttggtgttggtgtaccattaacgatactttcggcagctgtcactttttcatcatatgcttgacgtttattcgcatcagcattgacatagttaccactagtttttgtgtcagctttatcagcaatagcacgttttaaagctgtcatcgcagtatttatttcagtcgcagtatgttcaacaccatttgctgcagatacgcgtcctgcacttgttacttgtgcttttaatgcttctttttgttttgtatttaagtccgaagcgtttgtaatcgctgtgttagcagcctgtttcgcacgttctaagttttgaataccgtttaataaagtatttgcttgtgcaacagcttgcattgctctttcaacatctgctttaggtgtattaccgccagctgttttatttaaaatagttgctgctgcatttactgcttgagaataagcagttcgtttagcatcatcagcatcttgataattttgactttgtaacgtcgtgtctttatcacgaattgatgtttctaattgacccatagcaccatctaattgttgcgctttggctttaactgtattaacaccttcaacatttgttgcttgtgtaatttcattatctaacgctgtacgttgtgcattattaatgtgtgttaatgtacctaacgtttgtttcgcagcggctttagcttcatttaatttcgcatcaccgttcaacgccgtcttcgtactgttcacattttgtaatgcttgttcaactgctgctttgtctacattttgaccactagcttttgttaaaattgctttcgctgcatttacagcttgatcataagctgatttcttatttggctctgcatctaggtatttctgagtttgtttagtttgtgcctcatcattgataccgttttgtaaactatgcattgcgttatttaattctgttgctttggcagtttcttgatttacaccagctactgttgttgcaccatcaatgctacgcgttaacgcatctttttgtgcattgttaattgatgttaagttatttaagttgtttttcgcagttgtcttagcttgagctaagttttgcgcaccatttaatgcatgttctttagttgtcacttgtgatgttgcttgcgtaatagtatttggttccatcgttgggttcgatgtttgattaatgattgcttttgctgcagtaactgcgctgtcgtactcgttacgattagttggacttgcgtcagtgtagttttgacctgctttaattgttgcttcattcgcaatactatctcttaagcctttcatcgctgtattcaacgtttgagaactatttttaacagtttgaacaccttctaatgtagttgcactttgaacttgttcttttaattttgctttttgtgcattattcaattgtgctaagccatcaattgtattattagcattttctttagcaacacgtaagttgttatcgccatttaatgctgttttagccgcattgacttgtgaagtcgcactatttacatcattgactgttaatgtcgcattcggtgtaccattaatgatattttcagcgttagtcacttttgaatcatacgcttgacgtttttcttgatcagcattgacataattaccgcttgcttttgttctttctttatcagcaatagctgctttaagtgctgtcatcgcaccgttcaattcagtagctgtatgttgaacgttatttgcatcagatacacgttgtgcattgttaacttgtgtttttaatgcatctttttgtttttggtttaagtcatgtgcgttgttaattgtgttcgtcgcatttgttttagcttgagctaagttttgtacaccatttaacgctgcttttgttgtattgacttgatttgccatgccattaatcgcattagcatccatatttggattgttcgttgcattaataacaccatttgcattatttacagcagtattgtaattatttttgttgctatcagatgcatcaagataattttgacttgttttcgtcgtattatcattttggatacttgtacgtaatgcacccatggcagtatttaatgtattacctttatctttaacaccatttacaccagctacattttgcgcttgttcaacttgatgcttcaagttgtctttttgtaattgtgttaagtaaggtaaaccatcaatcgtatttgttgctgaagttttcgcatttcttaagttgtcagcaccatttaaagccgctttcgctcttgtaactgcatttaatgcattatcaacgtctgctttagatgtgttaccaccagtttgtttatttaaaatgccttcagccgctgtgacagcttgcgtatatgcatttcgttttgattcatccgcatcaagataattttgatttcttaatgtcgcatctttatcattgattgaaccttgtaagctattcattgcgccgtctaatgtattggcatttgtttttacagtattaacgccatcaacagtcgtcgcttgattgatttggccttctaagtcagtacgttgtgcattcgtaatatggtttaaagtgcctaagttttgtttagctgccgctttcgcttctgccagttttgcatcaccattcaatgcatctttcgtacttgttacttgttgtaatgcacggtcaactgctgctttatctgaatttgaacctgtttgtttatttaaaattgctttcgcagcagctacagcttgatcataagcagttttcttactttgttcagcgtcacgatatttttgagtttgttttgttgcattttcatcatcaataccatgttgtaattgacccatagctgtattaagttcatttgcagtttgttggatacttgttacatttgcaacacgttgcgcacttgtcacttgtgctttcaacgcatctttttgcgctttatttaagttagtagcaccatcgatggcatttgttgctgtttgtttcgcttgcgttaaattatgtgtaccatctaatgcatttttcgttgatgtcacttgtgtagcgatttggttaattgcattagcatccatatttggattgcttgttgcattaatgacaccattagcactatcaacagcattgttatagtttgttttgttacttcctgtagcatcaagatagttttggccatttttcgtagctgtgttatcttgaatgctatttcttaacgtacccatagcaccatttaatgtgttggcacttgatttaacagtatctacacctgcaacattttgtgcttgttgcacttgttgtttcaatttatctttttgagcagttgttaaatgttgaagtccgtttatagtagtgtttgcatttgatttagcttgctctaaattatggttaccatttagggcacctttcgcattagcaacttgtgacaacgcgttttcaacggcagctttatctaaatttgatccactatttttatttaaaatattttctgcgttcgcaacggcttgagtataagcagttttcttatctgaatcagcatcatgatagttttcacttgctagtgtatttgctttatcattaataccattttgcaagttagccatcgctgtattcaattgtgtacctgtattagatacagcttcaacaccagctacagttgttgcttgatcaattttagttgttaagtcacgtttttgtgcattattaattgacgttaagttatttaatgcatttttagctgcattcttcgcatttgtaacgttttgatcaccatttaatgcatttttagcacttgaaacattttgaatagccgcttcaacatcttgtttagacgtatttgcaccttgcgttttattcagaattgcttcagctctgcttaccgcatttgtatacgcatcacgtttagctttatctgcatcagtgaagttaacaccttgtttaactgtgttttgatcatggatagcttgttccaagttgcccatttgcgtgtttaactcagttgctgcatttttagcagctgttacctcactcacatgacctgcacggtcaatttgtgatgagatggcagatttttggttatttgttaagtgtgataacgtatttaagttttgcttagcagtgttttgtgcatttcttaagttttcagcaccgtttaaaccatttttagcattattcacttgtgttgcagcttgggtaatcgcactagcatccatagtcggattgttagtttgattaatgatacctttcgcatttgacacagcgctattatatgttgattggttattcggacttgcgtctgtatagttttgacttgctttgactgttgtttcgttagcaatactatctcttaagcctttcattgcattgttcaatgcttgtccatttgtttgaacagattgtacgtcttctaatctattggcttgtcccacttgttcttttaatttagctttttgaggagtatttaattgcgttaatgcatcaatagcagtattggcgttttgttttgctacacgtaatctttcgtcaccatttaattcttgtttcgcgctgtttatttgattagctgcagctgttacttctgaaggtgtcgtaacaaccgttggcgtaccgctaataatatgttcagcattggtaactttagttgtgtaagcattttgtttagtgctatcggcgttgacatatttactgcttgctaacgtattcgtcttatctgcgatggcatgttttaatgtgcccatcgccgtgttcagttcagtcgcattacgttgtacatcttgtgcattagatacgcgttgagcaccattagcttgtgcttttaatgcatctttttgatgttgatttaaatcagatgcgccattgattgctgtaatcgctgcttgtttcgcattgtttaagttttgcgtaccatttaatgcatgtttcgcattattaacattattaagtgcttgttcgactgctgttttcgctgtattcggtccagtttgtttatttaaaatggtttcggctgctgatacagcttgattgtatgcattacgtttttgctcatcagcatccaagaagttttggctcgctaatgttcctgacttatcgttgatagccgtttgtaagttacccattgcgccatctaaactatttgcactttgtttaacagattcaacaccagctaagtttgtagcttgtgaaatttgatttgttaaatcattacgttgagctgtagtgatatgcgttaaagtacctaaatgttgtttcgctgcgttttgagctgcaattaattttgcatcgccattcaatgcatctttcgcagtattcacacgttgcaatgctgcttcaactgcattttgcgcagtgtttggaccatgttgtttatttaaaatcgctttcgctgcagtaatagcattatcatactcttgttgtttatttgtatcagcatcacgatatttctcagatgatttaacttgagattcgttgttaataccactttgcaagctagccatagcttgatctagatgttgtgcattttgttttacagtatcaacaccactaactcttgtcgcactactaatttgactaatcaaattgttcttttgagcatctgtaatactcgttaatgtgtttaagtacgttttcgcattttgttttgccgtagctaagttttcatcaccgttaagtgccgttttagaactattcacttgctctgctttttgtgtaatcgtacttggattcatttctggattactatttgcattaataatcgtttcagcagcagctactgcgttgttatatgctgtttgcttatcattattagcatctacgtaatcttcacttgctttagtcgcatctttgttggcaatactttgtcttaacgtattcatggcttgatctaatgtattggcatttgattgaaccgtatgaacaccagcgacagtagtaccactattaatttggtttgttaaattcgttttttgtgcagttgttaaatgcgtcatattatttaactgctgtttcgctgtttgcttcgcttgatctaataaacgcgtaccatctaagttatttttagcagaattcacttgattcatcgcttcagtaacttgatctttcgttttattttgaccatttgatttatttaaaatatctttcgcagcttgtaccgcatttgtgtatgctgttttcttacttggtgtcgcatcttgataattttgactatttaatgtcgtttgttcgtcattgattgcaccttgcaagttacccatcgctgtatttaaatctgtaccttgttgtttaacagtatttacgccagcaatatttgatgcagcattaattttagatttaacatctgctttttgtgcattatttaaatgcggtaatgcatcaattgctcttgcagcatctgttttagattgtgctaatttttcatcaccatttaatgcatttttattagaagtaacagctgaagttgcacgattaacatcatcaacagacatcgttggatttgttgtttgattaatgattgtttcggcacttgaaactgcactgttatatgcattttgtttagctgtatctgcatccgcataatcttctgtacgtttcacttgatctttatctgcaacagcttgtcttaagttacccattgcactattcaagtttgttgcattttgcttaattgtattaactgcatcaatttgatgcgcaccattaatttgcgattgtaagttttgacgttgtgcattatttaaattgtttaaatgacctaatgcagtgttcgcttcttgtttcgcagtatttaacttagcttcaccattcaatgcatgttctttacttgtgacatttgataaggcattgttaacatcacttggtgttataactggatgttgtgcattaccattaataatgtcattcgcatggttgtatgcattgttgtaatcatttttcttgttagtatctgcgttgacataattatcactttgtacgacttggttatgattagcaacgccacgttttagacctgtcattgcagtgtttaagctttgagttgtttgtttaatattatttactgcttgaacattttgcgcactattcacttgttgtgttaatgcattcttttgcgcttggtttaaatcacttgcatgcgtaatcgcatttgttgcttctgttttcgcacgttgtaagttttgttgaccatctaaagcatctttcgtcgatttaacagatgctgctttttggttcactgtgttaacatccatcgttggattagtcgtttctccaatgacacctttagccgcattaactgcattatcatacgcttgtttattagctggtgttgcgtcagtgtaattttgacctgatttaattgtattattatccgcaacactgtcttttaatttcgtcatcgcagtatttaaagccgtaatgttagacttaattgtttcaagcgcagcatgattttgagcagcattaatttgttgcgtgaaattattttgttgtgcttggtttaagttagatgcaccatgtaatgttgttaacgctggttgtctatctaatgttaaaccttgacgtgctgtatttaattgatccttagcttggtttgcctctgccactttatcattgatattttggaccgttggattgccattcaacacttgattaatttcagttaacttttgacgcgctgcttgtaatttttggttgtacgcatttaacgaagcggtcgtcatacctgttgtatctgttggctgattaatgctttgttctaattgcgttttcgcattttgaagcggcgctttatctggtgttaaagcttgacgtgcattatccaaatcagatttagcttgatttgctgcagacgtatttgtattaatttgatctacagtcggtgaacctgctaatacttgactgatttgttgaaccttattacgtgcagccgttaacttcgcattataagcatttacagagtcttgtgtcataccagttgtacttgtttgcgtgtcaatactatgttgtagttgatttttcgcattttctaaaggtgctttatcgactgttaagccattacgtgcttgatcaagtgctgttttagcagcatttgttgctgtcacgttttgacgaatcgttgcaacatctggatgagatgccagtacgcgatcaatttcttgtattttagttctagctgctgaaagtttttcattaaatgtagcaacagatgcgcttgtcataccagtcgtactcgttggctgatcaatatcattttgcaactgagtttttgcagtttgtaatggtgccaagtctggtgttaatccagcaattgcttgttttaagctattatatttttcttctacttttgttttttctgcggcaatttgttggtctgtcgtgtcaccattgttaataacattttgtgcatttgttgattctgtttgacctgcacgtttagcattttcatatgcttggattgatgattgtgtcataccatcagtagttactgatttattgatttcttcatcaagtttcgtcttagcagttcttaaagcactattatcagctaaaggtactaattgattaattgcttgcgttaatcgctcattgacacgatttacatttgttaacgcagattgtacctcttgcactgttcttattggcttctgaatgatagcattagcgctatttttagcacttgttaagtcactttgaagtgcacgaatcgaattattgtaagcagtaatacttgccggcttcttaccagtcgttgtacctgtgcgattcaattgttgcactgcttgctctaaggcatgtgtatctgcagttaaatcatgtttcgcttggtttaatgctgttaatgcgttatcaacacgatgtttttcatctgaaatttgttgtgcagttgcatcgccattgtcaataacacgttgagctgcagttatttcagtttctgcttcacgcttcttcgcattatagttatcaatactttgttgcgtcataccagcagttgatggtacttggttcacagaactttgtaagttatttttagacgttactaattggctattatcttctttattttgaagtaatgctttagcttgatcaatcttagtttgtgctgcacgaactttagttagtgcgtcagaaacttgttgtggtgttgcacgctcattattaatcacttgttgtgcttctgttttcgcagtattgatttgttgttgcgcattatgcattgcattattgtactgcgtaattgtacctggctttttaccttcagtgcttactggatcatctaaatgatttttagctgtgattaactcacgtttatccgcttttgtgaaaatggactcttgtacttcttcagtactaccatcattgtaagttactgtcacaggaatcgtcgttgtgctaccaccagctaaattagtaggcattgctgtgccatttttaatcgttgcagtacgtttattagcaacttgaactgcattgttaatttcagctgctgttacatttgaaccataatctttcacaatttcagttgtgttgacagtatgtgctgccggtgcagttaatgtacttggattactacttactgagtgacctgtacctgctttcggagtaattgtgattgatgaatttggttttatagtattggcattgaacgtcactttaccagtttgtgcatctaacgttacatagtcaggcttattcgcaattgtccattgattattctgaccacgaacaacattaattgtcttactatgttctgcaccattacccactttttcagtgtaagcaatatccattgcttgtgttggattaattaaatgtcctgatggattattaggcgtgatatcaatatgaccattttgccaaatcttagtagtcgcttggttcggttgtggtgcgacaactgtgaaatcatcactacgttgctcatcactgattgtttcaccactaccttgtgttgcaacaacttgaattgtatcagcaggattgaaagtacctgctgcaacagtaataccattattagttccagcaatacctgctacagttgttgcagatgcttctttcacccatggacttgtattattgcgacgtgtaaatgttgtcacgacactgccgttacgtttaataactaatttatcagcatacgtcgttacgttaccggcatgtgtattcactgtttggtttgctccaggtgcaattgtaatcgctcctgccgctgtttcagtcacagttggtttcgctggttgcacatcttttactacaaatttcgctggtaaagatgttgcaaaagtatgtccgttatagatgacgtcatattttgcgttaacgactttagccatattaggtttattcatagctgcccagtttgcatcgtttgtaccagttgctgcattattccatttatacgtaaatccatctgttggtaaaccattagcgttttgcatatgtgcatatcctgatgcttgcgtaccacttgctaaagtgccaccaactgttgttgtataagtagtttgagggaattcaaattgatatacgttcacagttacaggaactcgtttagcagctgaaatacctggatatgtgacatcgacatttaaatgttgaacgcctgcttgctggttatttggttgttgtctatttgcccatgctgctgtaataccattcgtattagtatttggatcaaatgtaatgtaatcaatagcgtttgtaccatgtgtcaaattttgacctttcacatcacgtgatggcgccttagcattagcaactggataaactttgactggaacttcaacattacgcgtaccttgaccactaggtaatgttacaaccgcagttttatgagtgttaccgactgtattcttccatgtatctggactatcatgccatgcaaccgttgccccatgtggcgggttttgaataaatctttctacgtgtccgaaatcaaaaccgtcgccacctttaataaatacagcgccttcagtagttgcttgtaattgtggtgtcactgttactgttgcactgtcatttgaatcaacagattcatttcttgttacatctatcgctcgaccatgttcatcttgagtagtgtacgtcacattattcattgtgatagaagaccttgccttaatcacaccatttggtaacgcatcacttaccgttacaactgcagtattaccactaccataagtcgtgtttgtaatcgttaatggcgtattatctgctttaaataatttaatagatgaactacttaacacattattaattttaatttgttggttagtaagacctgctttataagtcacagagttgccatcaattcgcggtggatctggtttaacttttgctaaaatcttgataatttgcgtttggtgattatcataagtaactcgaatatcccttgttgaaataccaaccacatctttacttggtccatatgaatttgtaaattggaaattcatacgttgcgcattttgtgtccaagaatcattaactggtttaacatattgtttcgcatcatacacatcagatacacctgggaacacagcgcctctattcgtctcaaagacatgcttcggtactgtacttactactttatatgttgctgttttcgtaatcggcgttgtttcaccatcaattaagatatgtgcagttactgttatatcttcaccaatacgtgtattatctttatttggcgcttgaccacttacccaagtaatcgtcgcatctggaatggcactaccattagataacttaaagtaatctgatgcactagaaccattacctgctgggaagtcttggccttgtacagtgtaatgcgaatgtgcaacgatttttggaatgacatgctttacaggtacagtcactgttgatgttgttccatcttgataagtagcagttactgtaacattggcattatttccagtacgactgacattactaactgttttactagtgatttcattcgcacttgctcttgcataacttctatttggtactgtttcagtaaacgttaatgaattaataattgctgtttgatcagcttgtgatactgtcgtattattcgaaatattggcaattctcacaggattagcagccgttgatgaagtaccaactcgatatttatcacgcaaaggtttcactgttacattgaacgaagttgtagctgtattgccgcttgtatcagttgctaataaattgattgtcttattagttgctgatgtcacatttggtgccgttgcagaaacatgttgatggttattatcaacagtacctgtaatttgtgatgtatttggtacagttacagattgcacaccaaagttatcattcgctgtaatagtatttgtaaatgtttcacctgagaacacttgatgattagtgtaattacctactgaaattgtaggattcactaagtcacttggtacaaaataaatgttaatagcgtcagtagtatttcctgtattttgatttaaatgttcaacatattgttttggaccatatggcgttaagtataactgtgctttataaactgcatcacttgcattatgtgtagaattactttttacaacgtggtcaattgtaaatgcgccagcaccattagctgccggttcgtttacgttaacaacagttgagttactatggtttgcacgagtatttgaatttgtaacaggttgcccaccataaccgtttgaagggttgatgatgtctaacacttgaatcacttgaccattcaacgtaaattgacgttgaccatcagttgtcgcatttgattgtgaataaccagtcgttctaaagttaggtcttccgccagcttctgcttgtgttttttcattaccagtaatattattacgcaatccaggcactgtagtagtcgcttttagcatcgttaaaatatcattagttgtaatttgtgtgcctaatgtagcatcataacgataaattaaagatttatggtcatcagaccatgataaaccaccatctgttggtctgtttgcaatttttgcattcgtccatgtcactgtataatcttgcgggaaattaacccaacgcaagaaattcatattagctaggtttgacgcgaatgatttcgttaatcgacctttattaatatttactgtaatagtacttacattagcaccattaggtgtatttgtaactgaaatatcaccttcggcaagtgtaattacatctctatttgcattaataaaagcttgttttacttttgagatttcatcagtagttaaatcatatgttgacgtacgatagacacgttgatcgccttcaggttgtttcacatcaacgatttttaaactaatatagaaatcttcagtgtctttatgatatgcatttgaagcaactatgtgatataactgcgtgcctgcattcatttgactaacttcttgtgcagttggaatagttctatcagatgtaatatttgtaaatgtgccacttggaatagcttgtccattacttaaagtaaaatattgtttaatatcaccaatattaaatgattgtcctttagcaatcgttaccgttgctgttttagctgcattggcagtttgatattcagatttcacaactggttcgtatgtcatcacatttgtagcatcaagcgttgttgatgagccatcacggtaatgtaatgtgacattaccattattatcgacagttactggatcagttgatgctaaatatcctcttatattttggtttttattcataaaggcagtaattatgctttgcttttcatcattagatacagcagtcggattgactactacaactttctcagtatttcctaatacaatcggatgagcatcttcactaattttacctacatgaattgacacatgtttagattgactatcatttgtcgtattattgacattgtctgtcgctgatactttaaatgtaatatcactgttaaatgcctgattcatagagactctacctgtaatagctaatgagccgtttttgttgtcggatttagttaaatttgatgtccaaccacttggcaatgtcgtaatagttgtactttttaatccagaatgtctatctgaaacccccatagtaaagctaacttcatcaccacgataatatttggcatttattccaacaggattattgattgttggtggaatgtcatctggcaaaatagtaacagcattactcatattagatgcaactactttattataataaactactgctctaatttgtttacctactggtggtatgaatacaacataatcttttggttgtatagtaattgtgttatggaccccatcaggtgtaccagtcgcaagtatcgtataaccagatggtatttgatctgcctcactaccaccattcgtagtttgatttgttggtgcaactaaataaaccaatgcagatggatccaacggtattcccgaaatattaacaggtactttttgtaatgctgtacctcttaattgctcagctgtcgttgtaattgttggtgtatgtggtttaacacgaatttcgaataattgttctttacgtccaaaacgtatcgttccaaagtaatcccctggtaataagttaccaacaagttcaatattgcgttctctggcattattaggtctatttgtcgagttttcaatgtgtaatgtacgcggaatacctgtaatttgccaatctttatctgtaaaattctcattacttgttaaattaatacgtaatggttgaatagatgttacgctaccacctaaattcacggaagcattcccttggttacctgcatatacatagaaaactggatgcccagcttgttttgaaaatggtttttcagcaatattttgagtatcgtcatttttaaagaatttaatattatgttggatttcaggtaataccgttaagttaacaggaactaaagtttcactattaccataaccatcaggatagtcgaaaccaatcattaatcttattgggtttctagttcttgctgcttcttgtaatttttgatcagtaaataattgacttaattgatattcatttaattcctgaacgccccccggtctaaaagcgttagtagttgcattagttgggtaaaaacctaacactttattactcggcgtcttaacataacttaatggatcatcaacaaaatcatctatatttaggtttgtactttctaatacctttttcgtttgtacatttccttgactcacttctacacgtttagttgtacctatgcgatatgtacgattaaccacttgtcttaaaccattaagacgttgttgatggtcttgcgttgattcgacgtatagttgactgtacataaataattgattgtactctaaagcacgcccacctgctgcatagtacaatttattaacagttggaccttgtgttttaaatgaaattgtataacttgcatcaccttgaccgatgaaagtataaactttaggaacacccggtgattcagcaggtttttgaccattaatatattcaaaattttgtctaccaaatgctttagtagcagctgttgctccagcttcactaaaataatcactcgctctagataaatcttctaaagaataaacatggacagttggccagctatatattacttggccacttctatttcttattttaaagtcatgtgaacgatcaggatcatttactccatattcccacatttgttgaagtggtttatttgcacctgctcctgctccatgactccattgtacatttgttccatctgaattaactgttacaaagtcagttcttcctactggcacttggtctgctggtaatgcaaaccagaaaatcatattttgatgtggagcatgtcctttattaaacttaataacccattggtagccatctccagtttgtttcgctgtcataagagcaatttcctttgagtcagaggccttcaatgtattccatggtgtagttggtaaattatatggcgcccctttactagaagcattgatatatgtacctacaggatatcctgaaccatcattagcattttcaacataatatgatgaatttgcattttgatagtctgatactgatctaggctctgcagctctagactcaacagaacgcgtttgaattctgtttgatcgacggctagtttgttgacgttgaggcattgtacgaattaaagcaacagcttgttccaattctttgtatgcaagttgcaagtctttattgtttattggatcattactgcctaataacgtattaatcttatcaaaaatgccttttacatagttaaatgtgccagaatctgcattttcacggtcaataaagcgataatcatgataatttgcatcaaaaaatgcttgtaattcatttcggtcatgttgtacgttaccattatcagatgaatctgaagctgttactacatttgcttcatgattttctaaatgagccgctctattgtcgtttccatttttattagcagattgactttcgttttgtttatgcttaccttcttctttatctggttgtgttgtcgcagccgttgccgaatctttctttgtatttacattttgagatgctggttgttcatcattagtagtagatgattgcgctactttttgatctactaaattagcttgactaatatttggttgctcattttcatgagtagcagataatgattgactattttgtgaattttgagaattttgtacttgagattctcgattctcagtctgttcattattactttgttgtttctgtttaaccacgcttgctggttgatttgtttcagcagcatgtgcttgtgatgtattgaatcctaaaaataccaatgtcgcaatgacagttgaaaatgtaccaactgtatatttacgaatactaaacttttgaattttatcacgataattcacagctattgttcactccttatcttgttgttatgtctctgttgtgttgtgaatgtatttacttttgattgcttgtatattgtaatgctcattccattctcatttaaaaatttaaaacgatgacgattcaatacaatttcgcaatctatccaaaaagtattgaaacacattacaactatgtgttgaacaatttatttatgctcaagaatataataacacaaaatatattgtaaggtaaattgaatttgtgacaatttatattaattataaataaagtagtgtaaaagagtaataaaaaaccaatccctatgttcatttaaaataatgacacataagaatcggtttatatttttgtttaatattgtagcgacttgtatgatttcaatttaattctcaattatcataattgagtgtcgttttgtttaggcacaagtaacaaaatgataacgaatgataatattcccatacctgcatttaaccataatgcaatcattgcacctgtataaatgtttgtcatatttgatacgattgcatatactgcaccactcaatgcgacgccaaatgctccacctaatgcagaagccattttatagatacctgcagcaacgcctactttttctaacggtgcatttgcaattgctgtatctgttgatggtgtagcatatatccctagtcctaaaccaaagaataaataacctataatacaacaaatgacatacaatatttctggcaagaaagttaatgaaatgagacattctccgacaataagaactcctgttccaattaacattggtttcttgcatccgagtgtttgaagtaacttttcaccaacacgaatcataattagtaccattactaaataagtgattgataaacttcctgcttgcaatgaagaatatcctaaacctctttgaacaaatgtgttggctactattaatgttcctgcaacaccatttaacaaaaagtttgaagctgttgcacctgtgtaagctttatttttaaataatttaaaatcgattaaaggatttgtagcacgcttttcaagaactataaataaactaaaagatccaattgcaattgctaataaagtgataaaaagaagtgaggttacacctaattctgatcctttagtaattaaaatatttaaactgaggagcataatgactaaaagaaccagacctttaatgtcaaatttatttagagaaatcgatttagatttagtttcaggtgtgcctttaataagaaacagtgcaattaatgaaattataattgataggatgaaaatccaacgccaacctaaaagcgttgcaactgcacctccaaaaaatgaacaaacaccagagccgccccatgagccaattgaccaataacttaaagcgcgttgtctatctttcccaatgtaatatgacttaataatagacaaagttgcaggcataatacatgctgctgaaagtccttgaattaatcttcctataataagtaataaaggaatatttgaaataatgattaataatgaacctaatatatttaagataataccaatgttcgtgagtttaattctgccatatttatcagcaagaccacctgctcctactacaaacattcctgaaaataaagcagttatactaacggcgatattaaccgttccaatatctgtattgaaactatcttcaagtattggtacaacattaaccaatgattgtgcaaatagccaaaacgttattacacttaaaacaattcctattaacaacttattattgccttcaaatgcctctcttgacggcttttccatctctatttgcctccctatacttttgaaaaacagacaaattccataacagaaatttgtctgttcgttagaataattgaatggttttaattttaatgtgtaaaactttaaatttattagtagtccatccatttattctcaatgctagttatcttaccttatgctgctttttgtttcttcttatagtaataaactggtataccaagtgctgttattagaattccaatgattgctaatataaattgtgtaaacagtgtattaattaatacaaaagatcctgccaaaatagcaattaaaggtatgatcggatataacggtactttatatggacgctccatatttggttcacgttttcttaaaattattaccgcaacaaatgacatacaatagaacaaccaaataacaaagattaacatgtttgtaattgtatcaaatgctcccattgacatcatgatgatagcgattataagttgtataattgcgccaaaccatggtgcgccagattttgttaattttgcgaataagtggctaaatggcaataattttctttcagccattgcatatggtacgcgcataccagtcatagtatagccattgatcgtaccataaacagaaattaatataccgattgtaataattttaccgccattttcaccaaataatatttttgatgtatctgaagctgcatttaagttaccagcaagtagttctattggcaacgttaataaaaatgtagcgttaattaataaatatacagccataatacaaccgataccaactgaaatcgctaaaggtaaatcgcgtttaggatttttaagttcccccgcaacatttcctacatgaatccaaccatcatatgcaaacatagttgctaataaaccactaccaattgctgtaaagaaaccatttcctgaattacctgtagttggaattaatgaaaaagtgatatctccagattgaaaaataccaaaaattacaataacgatgattggaatcagtttaattactaaagtaactgattgtaaaattccgcctgcttttgaacctaggaaatttatcaacacaatagataacgcagatgcgattgctattggtattaacgaacctatagataaatggaataaattaattagctgtgtcgcaaatacgatagacaatgctgctacgttagctggaaaataaataaatgattgcgcccaacctgataggaagccccagaaatcaccgtatgtatattctatatacttcgttaagccacctgtttcagggattgcagcagcaagttctgctgctgttaaccccgcacaaatggtaatgatgccgcctaggaaccatacaaacaaggccattcctgctgttcctgttacttctgttacgtttgatattttaaagaatactcctgaaccaataactgtccccataacaatagcaaacgctgagaagaaacctatatttttttgtaattctttaccatttgacataattacacctcatttttaagattaaatgttttaacctaccacacccttgcttgtatctgcaatattcagtccatgttcaatgacacctgaaactctagttaagtcaacattcccgcctgaaactaaagcaacaacatttttatcttcaagccatttattgtttatttttccacttaaaattgcagctgttggtaatgcgcctgcaccttcagtaataattttggcacgctgcattaaatctttcatagcatgttcaatttcttcttcagtaacaagaataaattcatctactaaatgtttaactacttcatatgtttgttcaccaggaacttttacatcacaaccatctgctatcgtgctatccactcgatgttcagttaaatctctcttatagaaagactcagccataccatgaacattctcagattgaacaccgataatatgaattgaagggttaaatgattttaatgcggtggcaatacctgcaattaatcctccaccgccaactggtacgatgactgtattcacattccaaatatcatctaaaatttctaaaccaattgttccttggcctgccattacaaacttatcgtcatatggatgaacgattgtcatgccattttctttcgctaattcttccatataaagtctagtttcgttaaagtttttaccttttaaaataacctttgccccatagccttttgttgcttgttgtttcgcttgtggtgctgtttcaggcattacgatagttgcatcaatgcctaataatttagctgttaaagcaacaccttgtgcatggttcccagcagatgctgcgataatgcctttttctttttgttcatctgttaagtgattaattttattgctagcgcctctaaatttaaaagatcctgtgaattgcatattttctaattttagaaatacattccctttagttatactttggcttaaatacattgatttaattagaggtgttcgacgaataaatggtttaatgcttgctttagcttcttcgatatctcctaaacttacaatatgtgctgtttgtaatgtaactgtgttggttgtcataataattacatccttccgttttgtaaatttttagtccaaactataatgctatatttaaaatattcatttcactcaatttcatttaaattattatctattcgataacatttaatatttctttataatctaggtcatgtgatgaagctaatccttgatttgtcacttgtccttggtaaatgtttacaccagtacttaaggcttcattatctttaattgcttgttctaagcctttgtcacaaatttctaatatataatcaatatttccttgtgctaatgccattgttgaagttcttgggactgctcctggttgatttggtacaccataatgaatcacaccttcttcttcatacactggatcagaaattgtagttggtctaattgtttcaatagttccaccttggtcaatagctatatcgattaatactgaaccttttttcattgatttaaccatctcacgagtaaccaattttggcggtttcgcacctggaattaaaattgtagaaataaatacatctgctttcttaatttgttctgctaaattttctggtgttgatttgactactgtgacatctttttctgcatacatatcttcaagatatttaatgcggtcatcgtttaactcgataatgattactttagcatttagtcccaaggcaacatttgctgcatttgttgctgctacgccaccaccgaaaatcacatatgtactaccaggtatatccacattttcatgtacaccagtcactaaagtaccttgaccaccatgttgtgcttcagagtagtaagctcccataattgctgagcgttgacctgctatagcactcattggcgctaataattctgcttttccattttttataatggtttcaccactaatcgcagttacaccaacttcttgcattttttctactatttcttttgaagatgctagatgtaaaaatccccagataatttgattctttttgaaatattgatattcgctttcatgaggttcttttactttgataacaagatcagcttcccatgcttgttcgtgagttacgatcttagcgccttctttttcatacatatcgttagaaaatcctgaaccaatgccagcatttttttcaacaattactttatgtcctgcatccgttaacttacgcacattttcgggtgtgcaagctacacgtccttcaccttgttttaattctttgactactgcaactaacatttgcaacactcctctttcatttgtgaataatttcacaattattttatcctttggttatgaatatgtaaataccattaattaattattcatattttatctataatttgttaataaatatttaatatattattcttattcttaaatgttatgtgcaattataccactatatttatttcttatactccatttgatttatagttgtattaatacattgactcaaaaactaattaatcaaatatgtttttttagattaataaagttgtaactgtactattttgtagtgtatggtaatttatttggatgaaatataattctttatactctattgattaatcaaatatgtatctatcaaaattcggcttatttattcactctgacatatccaaatacgcaaaaagactatttctaccttgtatcgatagaaatagtctttttatacttaattggtttaatttttcataaaatcttatactttttaaaaatgggatgaaatatattttcctgaaacatgtaattcatgttcgttacaaattgataaaatatgattaagcgttgttgcaaatgacattttctcaaaaagcgcttcactatcaattggtacttgtgtgtgaatttcagccagtcgcttcgataaatatagttcatctaaattgtcattaatcttattacgttgcccagctgataatgcatcaatgttttcaaccacattttcaacgctttgatattgctgaattaacttaatagccgttttctcaccaattcctttaacacctgcatatccatctgctgtatcacccataaacgctttaatatcgattagttgttgtggttcaagggcatattcttcgttaaaacgatgtaatgtatatctattataaatgttaaaaccttttttaattagccagacttcaacattgtcattaatacattgcagtaaatctttgtcgcccgtaataatatagacatcgttatcagttgaatattgttgtgctaatgtacctataacatcatccgcttcatagtttttaacgccaatatttacaaagccaaattgctctgaaatttctttaacataatcaaattgtggtatcaattcttctggtggtgcagaacgattttgcttataaccatcaaacatatcatttctaaaagttgattgtcccatatcccaacatacagctacatgtgtagggcgtatttcatgtattgccgaaaagatatgacgcacaaacccttgtattccatttgtaggtacaccttgtgaattgtacataaattgtttatgaagacttgtagcgtagaaatgtctaaataatagtgccataccatctacaagtaatattttattaggcatttaaaacgttccttctttcttaatataaaatagttttcagttgttgatgtttatctttcaattgattgataagtgttgtatctaaatcaaatgctaataaatcgtttatttgcgtttgaatattagcttcaaaactttcaaattgcgattcagcttctacagccatttgcttaacatataattcaagttgttgcctcaataatcccatttgtggttgtaataatcctaacgtactttgacaaattgattcatgtatatctctttgcccatttggattcaaaattttacgttttgttaattgtttaggcaatgcatttagcatatcattgaaatcgatgtgcaataatggttgctctatattagctgattcaaagttaaactgaggattaacaatgacatgtaaatctgctaattgttgaacgattggtgcaatttgctcagtgagttgcttattaaagtatttttttatacgttctgtaattaaagattgctctaaaaacaatcgttgatgaatttgatctaagtatactttcgtagacactttcttttcttcattaaaatcactattttgcgtcatttgagaattaaacactgatttaacatcgtcaagtagttgtaattttaaacgtgcatttaaatgataaacttgttcttcaacttcgttgtctgtatgttgtaacgtcgcatcaattaattgatgttgtaaacgctgtttatctttatagactgttaacctttgttggcgacgtgaaatatcagctttatttgtttcaaattctgtaatcatctctacataagaacgatccatttgtttaagctgatgaatcatttgttgttctaaaattgatttagattcaacatcaacaaattgttgtatgctttgttttaattgatcaatgcccttatcttcagtttgtaatgcatttcgacttgatacagcaaaaatgtctgattgtaagtgtacttgtcttaatgcatctgatacatatgtttcaaccgcttcaagatcatcttgactttctgctaaatcagcagcattaattaccattttaaatgcttggttttcattcaactggttcatatctttcatgtgttctataaacgccttgtcattatcagtaaatgaatgattaaaataacttacatacaatattaagtctgaagaagttaaaatttgctcggtttcatttgtatgcctttggttatttgagtgtagccctaatgaatcaacaattattttaccttttaaccaatcatgcattaatgcaatgtgtactgttttaacaaatgttgcgtattcatcttctgcactccactttttcaattcttgttgattaatggcatgtttttcaccattttccaacatattgacatacaaattataatgtttttcaactgcatgtacaaaagcgagttgatttttatttaaatgtgattttaacttttctaaatctgaattaataaagtcttctatagttgaaaaagacatatcttggtattcaactactgcattaatttcatctaataattgcgattgtgattttagcgttatataactctcgtctccataagatatttctgtagtagctgctgtagtaggatttggagaactgactaaaatctgctcgcctaataatgcatttatcaaactacttttaccagcactaaatgttccaaatacacctatttttattaatttattatctatacgtgttaatgtttcgtggatatcttgctttgtacgcttgaacaaaggcacatccgaaattatatcaagcgctttttgaatatctatagacatatttgttgtagctgtattttgatttagctgctgattatcacgattatcctgagtattatcagtagccacttgatatgttgtctcttgtcgacctattaatttatctagagattcatctaaatgaatatagtagtgacgataattcttagtcgtcaatgactgacgcagctcatttaattctgtataacgttgatattcttttaaatcatcactttcttctgttggtaattcatctgcctgcacattttctattatttctttaaaaattggtgttgattgttgttcaacatatttcttaatggctttaaccacttcgtctgaaaatgtaagtacataagtattgctgattgatgtttgtggttgatataaatcttcaatcatttccggcttaacgtcataatgctgatttaatactttatctgaagcttcttttttattgataaaacgcgttacaaatgacatatcttctcgcattggttgacgaatttgttgattaacatgttcttgtaacgcatctgtcgctgttaataatcgctgttgttgaatttgtagctttttcttctttttattaaaaaacccaccaacattaaagtcttgagacatactttccaaataacttcgtaacatttctctcatattatgcggcataatgtatgcattttctaaaatatttttacgcttattctttaaaaatgccattaattcatctggattatttaaaagttgtgcctcttcactaattgcttgatgttgttgactatttaaaaatgcttgttcaaactccgcttcttcgatacctaaatcttctagtacttcctgaatttcagactgaatgtaatctagctgagcttcggtaatgtattcaaccgttcttgatgtataatcctctattgtctctctatgttgatctaatgaaattagataacttgataatacttcaagttcattttcagggtgatcaaatttagatacataaaaggtgcgttctaatttaatgccccaatctgcaattgatttttcaactcgtgatttaaacgtagagaatgacaattcatcgtcttgatgcttgtcaatttgattaatgataaacacaacaggtattccaacatcatttatatgcttcataaacttaaagttaagttcagattgaacgtggttatagtcaaccgtataaaatatcatattacttgtatacatatattgttctgttattgactgatgtgatgcaacatttgaatcaacacctggtgtatcttgcaacgtaaacccattttcaaatttagctgattgaaaattaatttctacagattcaacgtcgacattttggcgattcatttcccttacttcatcataattagataatttggcatacgtttgattcggcaaattagcaataatatcgtgattgtctgaaactgacacaatagcagtattacttgtcgttggtacaggtgaacttggtaagatatcttgttcaattaataaatttatcagtgtcgatttacctgcagaaaaatgtccaacgaacgaacatgtatattgctgcaaatatactttcttaattacttggttaattgtatgtaaaagtgcttcatttcgcgacttttcaacttctttttttaatttatataaaagatctaattgttctttattaatcatgttactttcccctttggttcgttcacatagaaatgcttgcttgttaaaacgaattcatacaatatcgatgtccatttaaacatagatcgttaaatggctcgcattgtattatgtttaaattttatcatagctgcttgataaaacatacgaataatcaattttcttcaaacattccaacttaaaagttcatatttctaaaaatcacaaatcatcgttaaatttttctagaaaataaatattgtcacagtttgttcacacacgtcacagaattgacaccgtataatagccaattgggagggaaatatgaaaaatacatttaatccattacaaagattacatttctatgcagcaatatttattgctccactgttaatcactttaaccatttcgggcattggttacttgttctttccagaagttgaaaataatatttataagaatgagttttttggtgacagtgatgtaaaaacgcatcaaacattaaatgatgcagtacatcaagttgaacaacaatatgaaggattctttgtaagtaaagttagcatacttgatgaaccatataacaaacgaattacactgagtgatatggcaggaaatcaacgttacgtctttctagatcataacaatcaatttgttgcagatcaaaatgcgaaacatacgtattctaatgtgatgcgaagtatacatagttctttgtttactgaaaatactattattaattatttagtagagttaaccgcatgttggacgatattcatgattttatctggtacttatttactcattaagaagcatttaatttctaacaaaggtaaggcacttcgttggcaaaagtggcacgcaatgattggagttatcattgcaattccagtatttgtattagttttaactggattgccatggtctggttttatgggcagtaaaattgccggtatgatggacacaaacggtgaccttggtcaaggtgaattagcgattaatccacctaaatcagatttgaacgaattaccttgggctacacgtaaaaataaacagccagcttcatccgaaaaaggttcaagtggtcatcatggtaatgcagcaatgcctcaaaccaaattagattatcaaatatctattgataaggtcgttgtacaagcgcaaaaagctggtattaaaaagccgttttcaatcgtatatccaagtgataaaaatggtacctttattgtatctaatactagtaattcaggtgttactgggctagatgtatcaccttacaaggaacaaacactttatttcgaccaatatagcggtaaaaagctaggtacgattaaatatgatgactacggtattattgctaaatggtttacatggggcattccgcttcacgaaggtcatttattcggcattttaaataaaatcattaatttatttgtatgtatcgctttattagtagccattggcatggggtttgtctcttggataaagcgtacaaaaaatactgcagtaaaagtaccacatcgcgtaaaaaaaccagcatctatatcactcataatatgtttaattgtattaggattattaatgccattatttggattatcacttatccttgtatttataattgaattaatattatatattaaagatcgtcgtgctaaacaataatgcacttaaagttttgaactgacgaaatttacaaaatgattctcgtctctctaattacttaaaacgggttctataataaatcgtactgatggaaagtttttactttttatctgtccgattttttgaatttgaagataaaaaagcatctaaaacgcataagaagataactctacttcttcaaaattacgttatagatgcttttttattaattcatatgcatgtcgtgaattttcatcattaaaccgtgtgggacgtcatcatgtttaacaatctcttgtttataaaatgtcttcccatcatctttagaaactaattttacaaagtctccttttttcggtttaaaatcatttgatggttctactttgatattatgtttgactaatccatctttttcactgacaactttttctgcatttgttttactattcatataaccaaaataagtcgttttttgactagaaaaaatcattaaacatacaacggcaataccaataacaatcaatgcaatagataaacctagacccatttttttacccatttatagactcctccatttttcaaaaatacctattatcatgagaacttaattattactaattttagtcacgcattagaaacactttagttttcaatagttttacgttctgtctttttaccccagtattgataataagtacattctatatatccattaaataacttacgtcgcttcgttgctttacgatctactaaatattcaaattctttattacttgttaaaatgtatgtagataaaaatggatgttgtttcattagtttaccaatataacggtacatttcttcaacttcttcacgatcaccaatacgttcaccatatggaggatttccaattaacgccaccggttcttctgtatcaattgttaatgtattgacatcttttacactaaatttaataatatcagacaacccaacttcttcagcgttacgcttagcaatctctaccatttctggatcgatatcagaagcatatacttcgatttctttatcataatcagccatcttatccgcttcatcacggtaatcatcataaatatttgctggcatgatgttccattgctctgatacgaactcgcgattaaaaccaggtgcgatattttgagcaattaaacaagcttctatagctattgtacccgaaccgcaaaatggatcaattaaaggtgtatcacctttccagtttgcaagacggattaaacttgctgccaacgtttctttaattggtgcttcaccttgtgctaatctatatccacgtctgttcaaaccagaacctgatgtatcgatagtcaataatacattatcttttaaaatggcaacttcaacggggtatttcgcacctgattcatttaaccaacctttttcgttatatgcgcgacgtaatcgttcaacaatagctttcttagttatcgcctgacaatctggcacactatgtagtgttgatttaacgcttctaccttgaactgggaagttaccctctttatcaattatagattcccaagggagcgctttggtttgttcgaataattcgtcaaacgttgttgcgttaaaacgtccaacaacaattttgattcggtctgctgtgcgcaaccataaatttgcctttacaattgcacttgcgtctccttcaaaaaatatacgaccattttcaacatttgtttcatagcctaattcttgaatttccctagcaacaacagcttctaatcccattggacaaactgcaagtaattgaaacatatatgattctccttttatacaggtattttattcttagcttgtgttttttatacatttccaacaaatttaatcgctgatacattaacgcattcgcttattattttaaaacaaggcagtgtcattatatcaagacaaggcgttaattttaagtgttcttttcatgaaaaaagctctccatcatctaggagagctaaactagtagtgatatttctataagccatgttctgttccatcgtactcatcacgtgcactagtcacactggtactcaggtgataaccatctgtctacaccacttcatttcgcgaagtgtgtctcgtttatacgttgaattccgttaaacaagtgctcctaccaaatttggattgctcactcgaggggtttaccgcgttccaccttttatatttctataaaagctacgtcactgtggcactttcaaattactctatccatatcgaaagacttaggatatttcattgccgtcaaattaatgccttgatttattgtttcatcaagcacgaacactacaatcatctcagactgtgtgagcatggactttcctctatataatatagcgattacccaaaatatcacttttaaaattataacatagtcattattagtaagacagttaaacttttgtatttagtaattatttaccaaatacagctttttctaagtttgaaatacgttttaaaatatctacattatttgaagatgtatttgttgttgtattattcgaagaaaaacttttattgtcctgaggtcttgatgttgctacacgtagtcttaattcttctaattcttttttaagtttatgattctcttctgataattttacaacttcattattcatatcggccattttttgataatcagcaataatgtcatctaaaaatgcatctacttcttctcttctatagccacgagccatcgttttttcaaaatctttttcataaatatcttttgctgataatttcaatgaaacatctgacattttttccacctcattagaaactttgatcttcagaccactgtaagtcattgatgaatgctgttaattcatcgaacgtcacaatatcacaagtatagtttgttttatccataaaatcaactaacatctgcttgaagaacttaggacttgcctcttgttcctcatcataaatgagcaatgtttgatccgaatgttcaagcataaattgatctgcttgtttaaattgaaaaggaccctgatacgacgtatgaaaaatactatcaacataatctgcatgcttaattatgttggcatacttactttgattatgttcattccacttttctgtatgtccttggaacggtgtaattacagcaaactttaacgaatcatatgttcgttgtaattcaataacaacttctgcagtccataattctatacccatttgcccttgtattaacacccattctaatccttcatccaacagttgttcaattttatgttttataaattgttttaaataatgtacttcaggtgcgtcatctttaaaaatgtttaattcgaatgatttgtaacctgttacataaactgttttaaccatgagtaccctcttttgttacgccatctaatatattttgtaaatcatattgaacacttttaagcttttctataaataactttcgacttgttcgcttaaaatgacattcgacagaaagttgttcaatgttagcaatcagtagctcaaatttccttgaattcatataaggtacttctataataaattcacgatgtaatttgatctcattgagcatgctatcaatatgttcagtatatggctttacagtttggtaaaaatcatgatcttgttgttgtgatttcacattttcaaaattttgttgcatgttgttaacttcataaattagtgattcgactacatcattcatgaggacgcctcctacattttttaatttatcacaatatactgtattcgtcatgttttaacactctatataatttgatttaactattttttcaaatgtgttatctgttaaatcaagtaaatctaaaaacttcctatataaatacaaaattttatcgtgtatgttgttatacgatgaaaatacttttaatctaataaaatcatttaaatcaaatacacctctgctgattaacaacacatacttgtacttgcctcaaaaataaaaattactgatcatgatttgacttttataacaaaattcaaaaatattgtaatgagtattcatttttataagcaaaacttttcaattaattaaaattgtgtgtaaaattccaacattaacggtaaatgtattataatattattgtgttaatgctgaaatcacgttaaaataagctttggtgtattgtgtctttcgcatttatactaatttaagtttggtgtttcactataatgttgtgtataataaacaacgtttactaccaaacttgtgtggtgaaatttatgaattatccaaatggtaaaccatatcgtaaaaatagtgctatagacggagggaaaaagaccgctgcctttagtaatattgagtatggtggacgtggtatgtcacttgaaaaagatatcgaacattcaaatacgttttatcttaaaagcgacattgcagttattcacaaaaagcctacgccagtacaaatagttaatgtcaactatcctaagcggagtaaagctgtgattaacgaagcttattttcgtacaccttcaacaactgattacaacggcgtttatcaaggttattatattgattttgaagcaaaggaaactaaaaacaagacgtcctttcctttaaataatattcatgaccatcaagtcgaacatatgaaaaatgcatatcaacaaaaaggtattgtgtttttaatgattcgttttaaaacgctagatgaagtttatcttttaccctattcaaaattcgaagtattttggaagagatataaagataatattaaaaagtctataacagttgatgaaatacgaaaaaatggttaccatattccttatcagtatcaaccaagattagactatctaaaagcagttgataagttgatattagatgaaagtgaggaccgcgtatgacggaaaacaaaggatcttctcagcctaagaaaaacggtaataatggtgggaaatccaactcaaaaaagaatagaaatgtgaagagaacgattattaagattattggcttcatgattattgcatttttcgttgttcttttactaggtatcttattgtttgcttattatgcttggaaagcacctgcttttaccgaagctaaattacaagatccgattcctgcaaagatatatgacaagaacggagaacttgttaaaacattagataatggccaaagacatgagcatgtaaatttaaaagacgtgccgaaatcaatgaaagacgcagtacttgcaactgaagacaatcgtttctacgaacatggcgcacttgattataaacgtttattcggtgcaattggtaagaacttgactggtggatttggttctgaaggtgcctcaacattaacacaacaagttgttaaagatgcatttttatcacaacataaatctattggacgtaaagctcaagaagcatacttatcatatcgtttagaacaagagtatagtaaagatgatatcttccaagtatatctaaacaaaatttactattctgatggcgtaacaggtattaaagctgctgctaagtattactttaataaagatttaaaagatttaaacttagcggaagaagcttatttagccggtttacctcaggttccaaacaactataatatttatgatcatccaaaagctgctgaagatcgtaaaaacactgttttatacttaatgcattatcataaacgcattacagataaacagtgggaagatgctaagaaaatcgatttaaaagcgaacttagtaaatcgtactcctgaagaacgtcaaaacattgatacaaatcaagattctgagtataattcatacgttaactttgtgaaatctgaattaatgaataataaagcattcaaagatgaaaatttaggtaatgtattacaaagtggtattaaaatttatacaaacatggataaagatgttcaaaaaacattacaaaatgatgttgataatggtagcttctacaagaataaagaccaacaagttggtgcaacgattcttgatagtaaaactggtggtttagttgctatatctggtggacgtgatttcaaagacgtcgttaacagaaaccaagcaacagatcctcaccctactggttcatctttaaaacctttcttagcgtatggacctgccattgaaaatatgaaatgggcaacaaaccatgcgattcaagatgaatcttcatatcaagttgacggttctacatttagaaactatgatacgaagagtcacggtactgtatctatttatgatgctttacgacaaagtttcaatatcccagctttaaaagcttggcaatcagttaagcaaaatgctggtaatgatgcacctaagaaattcgctgccaaacttggcttaaactacgaaggcgatattggtccatctgaagtacttggtggttctgcttcagaattctcaccaacacaattagcatcagcatttgctgcaatcgctaacggtggtacttataacaacgcgcattcaattcaaaaagtagttactcgtgatggtgaaacaatcgaatacgatcatactagccataaagcgatgagtgattacactgcatacatgttagctgagatgctaaaaggtacatttaaaccatatggttctgcatatggccatggtgtatctggagtaaatatgggtgctaagacaggtactggtacttacggtgctgaaacttattcacaatataatttacctgataatgcagcgaaagacgtgtggattaacggctttacacctcaatacactatgtcagtgtggatgggcttcagtaaagttaaacaatatggtgaaaactcatttgtgggacatagccaacaagaatatccacagttcttatatgaaaatgtgatgtcaaaaatttcatctagagatggcgaagactttaaacgtcctagctcagtaagtggtagtatcccatcaatcaatgtttctggtagtcaagataacaacactacaaatcgtagtacacacggtggtagtgacacatcagcaaacagcagtggtactgcacaatcaaataacaatactagatctcaacaatctagaaacagcggtggattaacaggtatattcaactaatccactcaacataaaatcctcagttataccatatttatggtgtagctgaggatttttttaggttcttcatcttttatggtgggaaggtaaaacttcctgctttttttataagtattcatacgctattgctatattagtagaaaccgtaaaatcagtcattcacatacattttgaaacatctaaatagtttttcatattcacatctttagctatgtaaaattattgaatttgaataagtggttgttcccattttaaaattatgattatattttctcatagtcatcttagacgctgttttaaattgatatgtttatcaattccctgtgtacgttaatcagcgaaatatcaagatgtttgcaacattttttcacaatcatagatataagaaatccacctacgattcgaaatagatatcttaaagcatatctcaagatatccattatgatgtagatggacagtttttatattaagacattgtaatgacacgacacctaacataaatacaaatatgtgtgcatgaattagttttacatattttcaacattaggaaatgatcaatcttgtctatacctgcttattctttaaccttgtttgataactagcattcattttaatcaattcagttttaaaggtcttcatttgtcgatagcccataaaatgatatttacgttcaatcatataatcatatctttctttaaaattcattggcacaacaggatattgatttaatttatcaaaatcaatattgccagttatgtcattaacctgcttaaaataatcaataattttactatggtattcatccaagtagggctttgcttcactagaacctaatgtcttatttttggcaaatacatcaatctcttgttctaaattatcaaatacctcttttgtaatatttgtcatgttatcacgcttctttcaaactagctttataacgtttttgtccttctctacaatcttctaatagtggacaaatatcgcatttaggttttcgggctaaacagtggtatcttccaaagaaaatgagttgatgatggctcctattccatctatctctaggtatgacagaacataaacggtcttctacctgtctcacattatctttccaacgattaatacctaagcgtttagaaacacgttctacatgcgtatcaacagctaatgaaggttcatcaaatgctacactcatgactacattagcagttttacgtcctacacctgctaaactttctaattccttatgtgtttgtggtatttctccattaaattgatcaatcaaagattgacaaagtttcttaatattcttagctttgttacgatacagaccgatagaacgaatatcattcataagttcttcatcactgactgccaaataatcttcaggcgttttgtattttttaaacagctcagttgttactctatttactagaacgtctgtacattgcgctgacaataatacagcaatagttaattcgaacggattatcatgttttaattcacattctgcatccggaaacatatttgctataacatcaatcatttctaatgcttttttcttacttaccatcaaggttctccccgtttaaccaatcaaatttaggtaccgttttaactgtgtgcgtcattttcggtttattaaatttttctcttatttttctagaatcgtcaattgttttgacattgtttttcttccaattaagtaaaatacgatccatatatttaaagctaagtttattcaaactattcgcctcgtctaatgccgcttgtataattgcactatcgtgtttatcaacatcaatccattgatttaacgtttctatttcatatggagataacggccttgcaaatgtatcctctaaaactctaaataattgtttaaatttttctttactattttgctctttcgtttccatactttgttgcttcaatatatgacttaatttttcgaaaaaaggatctagattcatatattcggtaaatctaccttcttcatctttttgaacttgtaattctagcaattcacgttgtatcaaattttgaataaccattgtaatatcgcgtggttgcatagttgagcccttctgaagtaattcaattgaaggctgtttatttgatgtttcggaagcataaatcaatttaagcaaaatgactaaatcttgctcatctaaacctaagtcactgtaatggtctaataattctcttcgtatcactacaggtcttgcttttaattgatatttatccatgttcgtgcccccttttaaatttaaccattacttaatagtataaatcattttctttaattttcgactaaaatgcttaatatatttaactagtagcaaacaaattttaaataacagtattttttaacactagattttaacaatgaactttatttataatcagatgaactatttattttccaaatatagttactaaacaaaagttttttcatgattaatataagccgttatcaatcttcattttccaagcataaatcgcccagctattaatataggctggacgattctttttattatcataatatatattttaagtaacgaccctaaaacttatggatataaacggtttaataatcttgggaatggcgctgtttcacgaacgtgttcaacaccagaaatccatgctactgtacgctctaaacctagaccaaatccacagtgtggcacactaccataacgacgtaagtctaagtagtaactataagcttcttcgtctaatccatgttctttaacgcgttgttctaacaattctaagtcatccacacgttcagatccaccaataatttcaccgtatccttcaggtgcaattaagtctgcacataatacagtttcttcattttcaggatttggttgcatatagaaaggcttaattttagttggataattagtaataaacaccggtaaatcataatgattagcaatggctgtttcatgtggcgcaccaaaatcttcgccccattcaatatcatcaaagccttctgcttttaagaattcaattgcatcatcatatgaaattctagggaatggtgtcgcaactttttcaagttttgatgtatcacgctctaaaattttcaactctagtttacaattttctaaaactgattttacaacatgtgttacatattgttcttgaatttctaaactttcagcatgatttgtgaaagccatttctccttcaatcatccagaactcgatcaagtgtctacgtgtttttgatttttcagctctgaaagttggaccaaatgaaaatacttttccgtgtgccattgctgcagcttctaagtataactgaccactttgagataaaaacgcatcttgatcaaagtatttagtatggaataattcacttgtaccttctggcgcacttgctgtcaaaattggtggatcaacctttgtaaatccatctttgttgaaaaattcatacgttgcacgaataacttcatttctaattttcattacagcatgttgttttttagaacgtaaccataaatgacggtgatccattaagaattctgtaccatgatttttaggtgtaatcggatagtcatgcgcttctgaaataacttcaattgatttcacttgcatttcgtatcctaagtcagaacgattatcttctgtaattgtgcctgtaacgtatagagatgattcttgagtaatttctttcgcaagtttgaatacctcttcatcaacttctgatttaactactacgccttgcataaagcctgttccatcacgtaattgtaaaaaggcgattttaccacttgaacgtttatttgttagccaagcaccaattgtaacgtcttggtttaaatgatctttcgcttgtttaatcgttgttttcataaccattctcctatttattttttcgttatacaatactcattcattttaacaaaatccgctttcaagttctagaactagactaaaagataacgtgtaaatggtaatgatttaagcacagatttgaacattaatttatattaagacaatataatcatcagtttcagacaaaatatataataaagcctcaatattatttgtatgaaggtcgttttttgtgctaacattcaagtttaattataaaactcaaattttgacgaccaaacaaaaattcttgtaacagaacatagcacatgtcatgtcacaagaattttactttgtatttcactttttctttttttgaatttgtcttaataattttccaaactgttgaatgtcgccttttttctgacgataattttcaagtgtttgttcaaaaaagtttttataattactgtttatgagtcgatcatcaaatgaaactattatgccgcgatcattttcatttctaattaatcttccaagtccttgtctaaaacgtgtaactgcatcaggtaatacatattccttgaaagttgaagtgaattcagaatccataagccaatattttgcattatgcttgttcataaacggtaacttcgctatcatcacacatttaataccatttgcttgaaaatcaaaaccttcaaaaaatgttgacgtaccaagcagtatggccttatcaaaattattaaactgttgtactattttataattttggttctgctgttgtgttaatacaacataatcttcaaattctggcaattcatttagcatatcttgtaccatatgcatcattttataactcgtaaataagactaaacattttgatgacgttatagtcgtatattcaataatatagcttacaatcgatgctacatactcatctatatttttatattgataagatgctacatcactcggtataaatacacttgtattttttgcactttgtaacgacgtgttaacttcaaatgtattaaagtgaacatctttgttgaataactgtttaaaagcttcaaacgaatgattaaattttaaagtaccagatataaaaatgagtgatttaaatttttccaatacttgtttcgttaatacatcttttacagcgtaatctttcacatataaacgtattgttgatttttgagataaatttttaatcgaaatgaaactagtatgtccagcttttaaactttgttcgatatttttaaatttatcttttaaatacaacaactgtttccgtaatgatttaactgttttatgactaatgccattgaatatttctagcgttttatttaacttatcgataatcgcatgtaaatccttcaaaatgtcttttgtttcaaaagtaaatacattatggaagcgatgaatatcatcatcataaacatcagaatcattgataatcgtaaatatcgttgagaacaattgctcatttaactcatgaatctcattcatactagccttcaagccaaaaatatcaattggtgcaatatctaatttttccaaaattcgctgcttttccagttgatcaattgcctttaacaatttttcattttcgtttttaccaatcaaaccaagctgatatttaatatcagcataactcaactcatttgtcacttgatttaaggcatagtctggtaagcgatgtgcttcatccactatacaatcatcaaacaattgatatattgaattttcaacatcagaatgaattaaatgtgcatgatttgtaataccaatttgaatgttctgtgcatttcgcttaataaaattataataatgaacatcgtgacgtgccggtacatatgtttcaattttctggtcaaaatacatcttttgaccaccttttaaatttaattcctgtatatctccggacggcgtctctgtaatccaaatcagcaattgcattttcaagatattcacttcgtaattacttgtgtcatcttttaaaatttgactaataagccccaatgaaatgtaatcacttttacttttaatcaatagtgcattaattttaaaatttaacgcttcattcattgctggaatatctttttctaacaattgactttgcagtaatttggtattggtagaaatcataacatgctttccagtttcaatattatacatcaaggccgcaagtaaatatgctaacgatttaccactgcctagtgatgcttcaatcattgctttttcactatgcatgagctgatctaatatagtttccgctaaatataattgctgcggtcgatatgttaagccaagttgatctacagctttgctatataaagacttcaagctgccattataatttgttgtcggctttttaaaatcaacttgcttacgatagataatctgttcgaacttttcgtacgatttatccaatggctttgcatcatattgcctaaccatctcaaagaaaatatcatacaaatcgtatttcaactgtttacttaaataatataattgcttcaaagtatctaacggtaacttttcaaatttttcaaaagctaatatcatcaatttagcagtagtagcggcatcttcgtcagctcgatgggcatttgctaaggtaataccatgtgcctctgctaattcacttaattgatagcttttatctgtaggaaaagctattttaaagatttctagtgtatctataacttttttgggacgatattgaatattacaatctttaaatgcctttttaataaaatttaaatcaaaatctacattatgagcgacaaaaatgcaatcttttatcttatcgtagatttcttgtgcaacttgattaaaatatggcgcttgttgtagcatattttcttcaatggatgttaacgcttgaatgaacggcggaatctctaaatttgttctaatcatagaatgatatgtatcaataatttggttattgcgcacaaacgttataccaatttgaatgatatcgtcaaaatctaattggttgcctgttgtttccaaatccacaacggcataggttgccatacccatagctatctctccttgctttagtgttaaaaatctatatctgcactaattaaacggtgtgattcacccgcttcatctctaacaattaaatagccatcgtaatctaaatcaattgcttgtcctttaaactgtttatcattttctgtaaatagcaacgttctattccaaatattagaagctgcaatatattcttcacgaatttcagaaaaaggtaacgttaaaaattgattatatcttttttcaatttcttgaagtaatatctctaaaaattgatatctatctaatttatttttatcatgtaattgtatacttgttgctctatgtctaatactttcatcaaagttttctagttgttgcgtcaaattaatacctataccacatattattgcttctataccatcattattagcaaccatttcagttaagaaaccacacactttaccattatcaatatatatatcattcggccatttcactttgacttcatcttgactaaaatgttgaatcgcatctcttatccctaatgcaataaataaattaaatttagatatcattgagaatgcaacgttaggtcttaacacgacagacatccaaagtccttgcccttttgaagaactccaatgtctattaaatcgcccacgacctttcgtttgttcatcactcaagataaaaaatgaagattgatttccaacaagtgactttttcgcagcaagttgtgtagaatctattgaatcgtatacttcactaaaatcaaacaaagcagaactttttgtatattggtctattataccctgataccaaatatctgggagttgttgtaataaatgccctttatgatttactgaatcaattttacatccctctaactttaattggtcaatcaccttttttactgcagtgcgtgaaatattaagtgattccgcaatgctttgtccagatatataattcggtttatttttatagagtaattgaagtacatcttgactatattttgacatgattatccacccatttcaaaatttcagtttcttcgttgcttactttacctgttacaatcgctatctcaatttgtcttagcacatcttttaaccacggaccacttttggcatttaaatgtgccataagtacaccaccattaaccatcatgtcttttctattatgcataggtaatcgatgtaatgtttcatcaatcgtttgaaggttaacgattaatggttcatgtccttgaatatcatttgcctttaacacgtctgctgcaaccattacatttttaatgagattcgtatcataatcataaacaaacatttttaattgttcttttgtaataatacttggtaatgcattcataatttgaatatattgattgatatcttttacttgtcgattacttagctttaaaggcttcaatgagtaattaatatcaaatttaactgatgctatagcaatcaacaattctaaatcaattgcttcagtcacattaatttgattcatatcaagatgttcgaaatatggcatataattaaatgctttcagcgattttaaatgattaaaactcttttcaacattaatacctcgcattaatttagttagttcaatcactatacgctcaattgataaaaatttaatatctgccatttgtgtacgcatcgcttcgaatgtttccgttgcaatatcaaatgataattgtgactggaatcttaaacatcgaatcatacgtaaagcatcttcttggaatcgttcctcagctatacctacagttcttattattcgattattaatatcttgttgaccatcaaaataatcatacaatttgtatgctgtatccattgctatcgcattcatcgtgaaatctcttcgttgcaaatcttcgtataaatcacgaacaaatgtaacaccacttggtctacggtgatcgacataatcttcttcagcccggaatgttgtcacttcataattttcatcattaaaaactacatttatagtgccatgttctttacctacaggtatcgtatgactaaagatggattctatttcatctggcgttgcacttgttgtgatatctatatcatgaatatttcttcccatgacataatctctgacagagccacctacataatatgcttcaaaaccagtgtcttgaatttgttctaatataggccttgcctgttcaaataatgatttatccatattattactcgcctttacttttgttatgctcatttagcattttttgataataatactcatattgatctgtaatgagttctgatccaaaacgttcagcaatatctgctagcatgtttttctgaagtttgttgtataacaccttatcttcaagtaatcggatagcatagtcactcgctgaatcacaatcacccacatctacgacaaatccagtttcaccatgtttaataacctctttaattccaccggcatttgaaccaattggaacgacgcctgttttcatagcctcaagtaaagttagtccaaagctttctttttcacttaataataatactaagtcagataattggtaaaattcacttacgcaatcttgtttccctaaaaataaaacatcctcttctacgtttaactctttcgtcaattgacgcattggcactaattcaggaccatctccaagtaaaattaatttactaggtatcttttcacgtacttttgcaaatgtttctataatagtatctatgcgttttacttgtctaaaattcgatacatgtattaacactttttcatctggtgctataccaaattgtgattttagtgctgtgttatgtttagttggaaactcattttcacgtacaaaattataaatcggtataatttctttgttagtttcgataatttcatgtgtttcttgcgctaaagatttactcacacttgtcacaatatcacttttttcaatgccaaatttaattgcaccttggagtgaatgatcatagcccaaaacagtaatatcagtaccgtgtagcgttgtcataatttttatatctttacctgacatctcacgagctaaaatcccacaaattgcatgaggtacagcatagtgcatatgcaacaaatcaagatcatattctttaataacttcagcgattttagtacttaacgtaatatcatacggtggatactgaaatactgcatattgattcacttcaacttgatgaaaaatcatattcggtaatggttttcttattctaaacgggatatttgaagtgataaaatgtacttcgtgacctcgctctgctaatttaattcctaattctgtggcaataattccagaaccacccatggacgggtaacatgttatacctatcttcattcgcttgcccatcctttctttctatttctctctattattctcgatgcgtagataattgtttaaatttaagtttatagtaatgttgagtttataatttcatatatctaaaaacaggtgttgtatatataatcattcatctagttatacttactttaaaaataatataatttcatgcgatgcaattcattggtctatgtttttaatcttaatcaaatccaaataaagcatatatttttatattcactttctttcgaatcgatttttatctcttgtattaaacttttccattgtttcattaaagctctctgtcatatctattcccattgaattcgctaaacataacaacacaaataaattatcacctaattctgctttaatcgtatttgcttcctctgaatctttcttctttttttcaccataggtatgatttatttcacgtgcaagttcgcccacttcttcagtcaatctagctaagttagctaatggtgaaaaatatcctgttttaaattgtccaatatatttatcaacttcacgttgcatttctaccattgatttcatttctacgttctccttatattgcatttctaatatagtatatatcaatttgaagtctcatgcatgtttagtgcaatctactgactctagctaaactagatgacaagttgtttattttagaagtttaataattcagtttatataaatgtaatgcattcctaactaaattaaatcaattgaaattgcgattataactttatgattcgtaccactacaataaaataatataatgaataatctaccattagaaaaataagcacaaaaaaactagcaatcacacaaaatgtgattagctagttaataagtgtctaatttaagttaattgttaatctataagattaatcacttgaacgcgcaagcaaaatgatacgtacaagctctgctacagcgacagcagttgctgcaacataagtcattgctgctgcagataatactttacgcgcatgcttgtattctttttcatttacaatgttcaatgccgtaatttgtttcatcgctcttgaactcgcatcaaactcaactggtaacgtaacaattgagaataataccgctaatgacattaaaccagcaccaatccataaagcagttgaaccaaatgcactacctatcgctgttaagataatacctaacatgatgatcatataacttaatgaactccctaggtttgcaacaggtactaatgctgctctgaatcttaagaaccaatatccttggtgatcttgaatggcatgaccaacttcgtgggctgcaattgcagttccagcaactgatggtctgtcatagtttgcaggagatagtgaaacaactttctttttaggatcgtaatgatctgttaagaatccttcacctttaacaacttcgacatcataaataccgtttgcatgtaaaatttctaatgcaacttcacgacccgttttaccactagttgatctaacttgtgaatatttctcatagttagatttaactttgtgttgtgcccataaaggaagcaccattaatattacgaaataaattatcatagtaaaaattgaagacaataaactcactctcctttataaatattttactgtcatttgccgtttttatcaaatcatttacactttaataatttgtttaattcaatataaagcaaaagtccaaaaacactcagacaacatgataatacaccaatttgccacacatgcgtagttataaaatcataatatggaaattgaaggtgaaaatagtcaatataatcattcaaaaatacccaagtcatcgctacactgattccaatcatagaacgtttaaacctaggatagaagtaaattgcctgaacggccattatactgtgggaaaacattaatatcaaaccatttactgtaatatcaccttgttcaataataaataatatattcataataactgcccaaatcccatatttgaataatgttacaaatgccagtgcatcgataatactattttgtttttgaattaatatcaatgtgatagaaataactaagtataatattgcagttgggctatctggaacaaaaatcttaaaatgccacggcgtatgacttaattgttcaccataccatatataaccataaatcatccctaatatattacaaatgagtagcatcattaaccaagaacgttgataaagtgtatattgccaaaatgtattaatcgtcatctgctaagtcctcaaattgattatgtttatttactagcttgagtgtatttaaaatttgcgttagttgataaaaacgttgcttttcattcatctgtaaacttaaatcaatattatgtagcaagtaatctattaataacgcatgtttatgccgatctatagccatactatttaagtcatgaagataagtttgataactgggcgattccgttagttgagcaactattaaatcatctagcctttgctcacgctttgacacgtttgcgaagtgaatttgaatatcaaaagcacagttatgattagcgatataatcaaatatttcatttgtattcattaactttatattacgcttagtaaattgaattgcagaagcgtgacttcccacttctgcaatttctaatgtttcatgatgattaatttttgtatctacaaaatgaatgtttgccaatttcgcctcattcacttttatatagttaagcacccaaactgcaatacgcgacttaaatcgatattgaaaaagtaaatattcaataaaactttctttaatttgattgagtgtctctgacatcaaataccccattttaagattgcaatcttgataattcgtcatgccaattttcgttacttggttctagttccaacaattgatttaaaatagtaattgcttgttccttttgaccaatttcaattaaatagaaataataatcactcataaaatcaatatttgttttcatcgttggatatgctaattcaaagaaatgttgagcttctttatctcgctcttcttgaccataggcgaacgctaaatgccacatgaatgtaggatccaaatcttcttcatctacatatgttaataattcaatgattgcttcataatcttcttcattacgatataaatcgcttaaaatcaataaaggttcttggtaagcattatcaacctctaatgcttgttttaacaataatacaccttcattagcatcgccgtgttctatttccaaacatccagttgtatacattaactctttataaaattgacttagtcgtaatccttctttacccgtctcaatggcatctggataatttttttcattttcatataatgattgtaaatacaagtagccttgaatataatcaggatctttagaaagtaatgtagtcattattttaattgcttcttgagtgatgtcatttttatcgtaagaaatggcttttttgagataatcttctgaagtcatttcatcttcattaatttcatcgtataagcgaatcgcatcactatagttaccactttgtaaactacaatctgccatacgagagaataagtttacaccattaacttgatattcaccagtttctaaaacggtttcgtattcagaggtagcacgtaaatattgaccatcataatataacatttcagccaatgcaaaatggattattggatcatttggctctagttcaagtgcttcttgtaatttatcaatagcaacttccatcatattaatttgttgatataaatctgcttctaacatcaacttttcaggtgatggttcaacataacttaaatattctaacgcttcgtcagtttgattttcagacattaaaccttcaataaaataaatcagcaattcactttcgtctggatatttttgatataacacgcggaatacttccaaaccttgtggcattaatccaaaattgtaaagtgtctctcctagaataaataatgcgtcatcgttgtcagtagttattgcttcattaacacgagagtctaaattttctagtttttgtagattgatatcgtctattaatttatagatatcttccattttatattatccctcattttctaaaagctttagttttggtaaaaatcctggaaatgatacatttacagcatcaaattgtttgattttgacaggctcgcttgaaagtagagaagcaactgcaagcatcattcctattcgatgatcagttaaactatcaactgttgcatttgttttaaattctgacggatgaataatcaatccatcattagttggttgtaattcaaaccctaacaagtttaacatatcagccgttgtatcaattctatttgtttcttttacttttaattcctcggcatctttaattgtactcgtgccaactgcttgtgtacaaagtaatgctattacaggcagttcatcaattgcttttggcactaattctccttcgattgttattggttgaagcattggtgtgtattgaatacgaatagaagcagtaggttcagcaccagttgtttgattgaaaagttggatattaccgcccattttttcaacaatatcaataatacctgaacgtgttggattgattccaatattatgaatcgttacatcacttcctggtgtgataagtgctgcaacaataaagaacgctgcagatgaaatatcgccaggaacatgaaaatctgcaggtttaatgtatcgaattgcttcaggggttgtattaattgataacccttctgcttcaattggaatattaaaatgtttgaacatcgtctcagtatgatttcgacttacatctaattctttaatgatggtcggttccttagaaaacaaacttgcaaataaaatggcactttttacttgtgcacttgcaacttccatttgataatttataccttttatgacagatggcttaataattaatggtgtataattatcttcaataccttcaatattcgcatccataagtttcaatggtctcaagacacgatccattggccttttaccaattgaaacatcgccagacaaaacactttcaatacctaaaccacttaacaaacctgccaataatcgtgttgtcgtaccagaattacctgtatacaatacttgatgtggcgtgttaaaagattgatatcctggggaagtcacaactaatttttcatcatcttctttgatttctacacctaacagtcggaaaatgtccatcgtacgacgacaatcttcgccaagtagtggcttatatatagtagatacaccttcagctagcgacgccaacatgattgcacggtgtgtcattgacttatcgcccggcacttctatttcgccctttaacggacctgaaatatcaatgatttgttcatttaccatttcattcacctacttaaaatatgtttttaattgttcacatgcatgttgtaatgttagttgatcaacatgttgtacaacgatatctccaaattgtctaatcaagaccatttgtacaccttgcttatcattctttttatcacttagcatatattggtataacgtttcaaaatccaagtcagttatcatgtctaaaggatagccgagttgtattaaatattgaatataatgattaatatcatgcttagaatcaaacaaagcattcgcaactataaattgatagataatgccaaccatcactgcatgaccatgaggtattttatgatagtattcaacagcatgaccaaatgtatgacctaaatttaaaaatttacgtacaccttgttctttttcatctgcaataacaatatccagcttcgtttcaatacctttagcaatatatttatccataccatttaatgactgtaatatctctctatctttaaagtgctgttcgatatcttgcgtcgctgattcaccattcaataacgcatgcttataaacttctgcatagccacttaatatttgctcaaatggtaacgtctttaaaaagtctaaatcataaatcacagcagttggacgataaaatgcaccgataaggtttttaccttgctttgagttaatacccactttaccgccaacactagaatcatgcgctagtatagtcgttggcacttgtataaagtgaacgcctcgtaaaagtgtcgccgcaataaacccagcaaaatcaccagttgcaccaccaccaacagcaataattgctgtattacgagttacatgatgggataaaatatactctaatgtttcttgatattgctcaaatgttttcgtcttttcaccagctggaataataactttatgtacattttcatatgataaaatatcatcaaatttatcagcaaaatattgatttacatgctcgtcaattaatataaaactttgatcaaactgatcaatatacgtgctaatatggtcaattgcaccgtgttcaacatatattggataattatttgaagggtatgttgtttgtaatttcatgattacacctcaattgttcttgttgttaaaactcaatatttaattgtctgcggtcagcaatttgttgttgaagttgttcaatatggtttgattgaaactcttcaagtaatgctttcgctatttcaaatgcaacaacgtgttcacacactatacttgctgcaggtacagcacaactatcagaacgttcaattgttgccttaaagtcttctttagtatttatatcaactgaatttaatggtttatataacgtaggaataggtttcattacaccatttacaataattggcataccatttgacataccaccctctaaaccacctaaatgattagatccacgataataaccaatttcactattatatagaatttcatcttgaatctcactacctggcttttcagctgctttaaatccttctccaaagcttacacctttaaaagcatttatgctgacaacaccttgtgcaatcttaccatctaacttacgatcataatgcacataactaccaacaccaacaggcatattttcaactacaacttgaacgacaccgccaattgaatctccttcatttttagcttcgtcaattttatctcgcattgcttgtgcgatactgtcatcaattacacgaacatcattacgatcaagatttgctttaaatgtttctgaatcataaaaatctttatctttaatgccacctatttcaacaacacgactgtatatatcgatatctaactgttgtaataacactttacataaggcaccgactgcaactcgagctgctgtttctctagcagatgatcgctctagcacatttcgtaaatcacgatgattatatttcatacctccaaccaaatctgcatgaccaggtcttggttttgtaatagtacgtttcatattttcacgttcttcttcacttattggagctgctcccataatttttctccaatgcgtaaagtcatcattggttacaaccatagtaattggactacctaatgtataaccatttctaacgcctgatactatttctactgtatctttctcaatttgcatgcgtcggccacgaccataacccccttgacgcttgaacatttctttattaatatcttcaactttaatttctaaatttgctggtataccttcgacaataactgttaattgaggtccatgtgattctcctgaagttagatatctcatacacactcgctcctttcatacttccgcaataacattataatatgttgttaatcttatcacattcattgtggattcataaatgtttgttttcaagcttaattaagaaaatggatgacatctcattttaaatgtcagaattatcttaatattaaacgaactaaaattaattataatatattcgtctgtagaaaagtatcatgaatttctaaacagttgcatcatataatcattaattaaaaatgattagccgttttaatataatcgtatcgcaactttagcaaataatatactgactacatttcttaatacaaaagaacgaactgttaattattaataaagttaatcagtccgtttaaaaaaattatgatattaaaatatacatatgttaagcgcttttgttatactttgacttcaaaaatataatcaattcttttactaatacataaaaaaatataaatgagagtcagtataaaaataatttttgttataggattaagtggtttatctaaaaatatagcaccatatagtaattccattaattttaagaacattaaaatccccaaaataatcgaaataatattcttcattttaacaaccccttctctctgtttagtttcatttgataaagaatattcctctctttttaatacgtgttaccaaaaaactataaaatttttcaagtaatttactacaacataaaaaacgggccttgttatgtataatcataatgactaaccacataacaaaaccctttctacctttataaataaatcgtaaaggtttacagtttaaattttattcatataaccatgcatcacgtggtgaagcatagctagtaatttcattttcattaaaccatagattaatttcacgttcagcagactctaatgaatctgaaccgtgaatgatatttctaccaacagttaaacctaaatcacctctaattgatcctggtgaagcttctgaaggatttgtgctgccaataatatgtctagatacattaactgcatcttcaccttcaactaccattgcgaacactggtgctgatgtaataaatgaaattaaatcattataaaatggtttaccttggtgttcaccataatgtgtttcagcaagttccattggtacttgcattaatttaccaccgacaagttttagtccttttctttcaattcttgaaattacttcaccaattagatttctttgtactgcatctggtttaatcattaaaaatgtacgttccactttatgtatccccctgtgtttaataggtttatgtatattactattatatattaacaggttggtaaagcgctttcaatacttttcataaatactacgtgtttcttgaacccatttttttcgtcaaacttaaaagtagtgatttcggatgtccatctggtaactcagaaatcaaatccaaagctttacttaaatacttcgaacttactgccttagcctcatcgatgctgtcagattttctaatgatttggatacattcttcaaattctttacgttcactatcacgacgtaattgttcaattttcaatttgaagtctgggtttttacgcatttctaataaaatcggtaacgtaatatgaccattaagcaaatcacttccgaccggcttacctaatttcttttcggtacttgtgaagtctaatacatcatcaatgatttggaagctcatacctatataatgaccaatcattttcaattttcgtacagtctctttatcagattgagatgtaattgcaccaacttcagttgataattgaattaacagtgctgttttgcgattgatacgtcgtaaataattgataattgtctgttgactgttaaattggtcttgaaattggaaaagttcccctctacaaacatcaacgatagattcagatattaattgatgtacacgattatctttaactgccattaagtgttcaagtcctaatgccaataaaaaattcccagttaaaatagcagttgtctgatcccatttctttgatatggttaacttgcctcgacgcttgtcgcttttatcaataacgtcatcatgaacaagtgttgccatatgaattaactctaatgcgactgcaacttgatacgtttgttcagacgtttgttcatctttgccaaattggctactcagaataacaaatgctgggcgtactcttttaccaccagaagacaataagtgtaatgatgcctgttctaatacagaatctttactttttattgccttttcaagtcgttgttccactttcttaatttcattgttcatgtttaactttgccacgttaatcacctttggtattatctttttctttatagccaaggtgcattgcagcaacgccccctgtaaaactacgtactcttacatttatgaaacccgcttcttcaaacatgcgcttcaactcttcttttccaggaaaattaaacgtagattgctgtaaccattcatattcttcttttgattttgcaaataattttccaaaaataggcataacaaatttaaagtataatgcatacatttgtttaaagactggcaaagttggttggctcgtttcaagacataccaccataccacctggtttaagtactctattcatttcttttaacgcgactaaatagtctggcacatttcttaatccaaacccaattgttacataatcaaaagaattgtcttcaaacggcaattccattgcatcaccatgaacaagtttaacattttccattgaagcagttttttcttttcctacttctaacatattctcactaaagtcaataccagtaacttcacctgttggtcctacagctttgcttaatgcgattgtccaatcaccagtaccacaacaaacatctaatgctttcgtcccttttctaacgcccatgtctttcatgacgcgttttctccatactttatgctgctcaaaactaataatattatttaatctatcatatttttttgaaatattttgaaaaacgcgatgtacttgctctttatttgctttattgtcagccatgcttaattacctctactttttaaataacttttttggatatcgtgtaagtaatgctttacttcactttgattatatttcttgaagtatgatggatagtaatcagacatatcttcaaataaataattatatatttccgactcatcaatattgataccgaaatgagataacgtaatatatgggaaaagtgtttcaatttttactattgcttgagaaatttcataatcatttaaagcttgatgatgtaatgaagatttcaattcattaatttcaacaattgctttactaatttcattttgaaatgataaatcattgatttctgctagtagcgtataaaaatgtgcactaattaaatctccaatcaaaatggaatgtttagacaaatgattatatgtaatgtcatcaaggtgtctcattgatgtgtcaattgtgaggcatgctactttggcaacatctggaatatcatatgaatcaagtaacttacctaaccgatgattaatattaatggattcatattctgatacaccctttaatctttcttctatttgtctttccaatttgctaacagttgtttccatgtctacacctcacgatattatcactattcatattaacattatatgtaagaaattaaaatcttttgaagcattaagattacttatcatttttaaatttcaatttaaactaacagtaatttatgtagcttttgtaattctcataacaacctttacttcatttacattattcatctttttaaataacgtaaaatactatagtagatatggttaccttttaagtaaattcaacgctaacaattaatctcattattcatatgtatattttgtagttgctatttttatcaaaactatgatgtcatgtaatattttgaacgcttaaacaatgaatgttccaaagattaaaaacttagaagaacattacaatttatgtacaggttgtaagtattaaaagcaaaataaaaagcccttattcagggctttttaagtaaaattattttacagcatcttttaatgctttaccagctttgaatgctggaactttacttgctgggatatcaatttctttaccagtttgagggttacgacctttacgtgcagcacgttcacgtacctcaaagttaccgaaaccaattaattgtactttttcacctttagcaagtgagttttggattgattcgaatacagcatctactgctgaaccagcttcttttttagttaaatcagcttgctctgcaactgcattgattaaatctgttttgttcattagacattcacctcctgaggtttgataatgatatgtttatatcattatggtaaaactttaacacaagcattacataaatcgcaatcatttatgtggcaaaaacgttgaatttaagccatttctattcattttacgtaattattagccgtatatgtgtaataatacacattttattcagattttttatcgcgctccattaaatcttttacgcattcttttactgagatattttcaaataatactctatataatgcatttgtaattggcatatccacatttttttctttagctaaatgataaactgatttagttgtataaataccttcaacaaccatattcatttcagataatgcttgatccattgattcaccttgtccaagtttatatcctaatgtgaaatttctagaatgtgttgatgtgcaagtaacgattaagtcaccgataccacctaaacctagaaatgtcataggatcggcacctaacttttcacctaatctactaatttccgctaaaccacgagtcattaatgcagcttttgcattatcaccgtagccaattccagctacgataccacttgctactgcgatgatatttttcaatgcaccaccaagttcaacaccaatcaagtcatcattcgtgtacacacgcaaataatcattcataaataaatcttgcgttaatttacttacacttttatcttttgatgaagcagcaactgtagttggttgcttgactacaacttcttccgcatgacttggccctgacaacacgccaatacctgcattatattcaggtgaaatagaatcttcaatcatttctgacacacgtttaaacgtcccattttcaatacctttagcaacatgtataaaagtctttttagaggtcagcttatcattaatttgagaagcaacttctcgcattgctttagtaggtaaagccattaagtaaatatctgcaaattgaattgctttggtcatatctgaagtagcgatgatgttaacatctaatttcgcgtattttaaatactttttatttgtatgacatgtatttaattcatcaacagcatcttgatttttaccccacatcaaaacatcatgtccattttctgcaagaacattggcaagggctgtcccaaaacttcccataccaaaaacggtaattttagtcattgttatcccccaatcgttaatttctctttcgagctataatatgaattggtgtaccttcaaaaccaaaagcggcacggatttgattctctaaatagcgtttataagaaaaatgcattaattctacatcattaacaaatacaacaaatgtcggtggttctatagcaacttgtgttgcataaaagacattcaaacgtctacctttgtctgttggtgtagggttcatggaaattgcatcagtaacaacttcatttaaagttgaactttgaacacgttttttatggttttcacttgcttcattaatgtaagggaataatgtacgtaatcttgtgcgttctttagcagacacaaaagcaatttgtgcataatctaaaaattggaattctttacgtacttcatcttcaaatttcttcatcgttttactatctttttccacagtatcccatttatttacgacaatcacgactgctttaccttgttcatgtgcatatcctgcaacgcgtttatcttgttcaatgatgccttgttctgcatcaatgaccactaaaacaacatttgaacgttcaatcgcttttaaagctcttagtactgaatatttctcagttgattcatatacttttccttttttacgcataccagcagtatcgattaaaacataatcttgtccatcataactatactctgtatcaatagcgtctctcgttgtccctgcaacattagaaacgataacgcgatcttcacctaaaatagcatttactaaacttgatttacctacgtttggtcgtccaataatggatagtcgaattgtatcttcatcataaggatcttcttcctcttcaccaaaatgagaaacaactgcatctaacaagtcaccaagacctaaaccatgtgaccctgatatcggatacggttcaccaaatcctaatgaatagaaatcatacacgtctgtacgcatttccatattatctactttgttaaccgctaatacgaccggttttttagatttgtataaaatttgagcgaccatttcatcgctttgtgtcaatccttcacgcacgttaaccataaaaataataacatccgcttcatctatggcgatttctgcctgcgctctaatttgtgtttggaatggtgcatcaccaatttcaataccacctgtatcaataatattgaaatcatgtgttaaccattcacctgaagaataaatacgatctcgtgttacacctggcgtgtcttccacaatcgaaacacgttctccaactattctattaaaaattgtagatttacctacattaggcctacctacaatagctactataggtttagtcataagctaacttcctctctttcttatatctttttaataatatcacatgagactgtgtattcaaaatgagtttattactgtaatgataaaaatcagcacttaaaactttatctttttaaacacttagttaaatttgtccacgttatcattacgagtatattttgttacataaaaatactccacatgcaatcataaacatgtggagttgactattaaatattaaattatagtttaagatttttaagtttatcaccaatcatatcgccaattgttggattatcttcttcttcgctttctaagtacgccttagtcgtagaaggatcactttcaacaacatcttcgtttggtaatgttgctttaatagatagtgatactctttcattctcttcatcaatacctaatattttaacatttacttgttgaccaggttctaacacttcacctggcgtaccaatgtgtttgtgtgcaatttcagaaatatgtacaagtccttgtacacctggtgcaatttcaacaaatgcaccaaagtttgccaatcttactacgacaccttcaatgacatcattttcgtggaattgacctttaatattttcgaaaggtgttggtaacgtatctttgattgataatgaaatacgttctgtatctctatcaatagatttaattttaactttaacatcttgaccaattgaaactacttcttctggtgtttgaacatgttcgtgagaaagttcagatacatgcactaaaccatcaacaccgccaatgtctataaatgcaccaaattgagttaaacgcgctactttaccatcaataacatcgccttcatttaaagattgtaataattgatcttttttagcatcgttttcttcttgttcaactgctttacggcttaaaatgactctattattttcaggatccaattcttcaactttaatacgaattgtttgtccatcaaacacagagaaatcctcaatgaagtctgttgaaattagtgaagccggaacaaaacctctttgtcctacatcaacaaccaaaccacctttaacaacttctgttactttcgcttcgatgatttcattattatctaatttttcttgtaaataactataagacttctcagtttcaagttgtcttctagataagatgtaagctccagtttcattttcttcatcaaactcaactttagtgacatatgcttcaacttcgtcgccctcttttacaacttcacttgggctatcaatatgatgcgtagatagttgactaataggaataatcccattaaatttaccaccgttgatatgaacaacaacttgcttgtcttcaacttgttgtacctcgccagtgactttgtcaccttctttaatatcgttaatcattgattcattgaattcttcagtcatcttgtttgcctccttatacactacatatttataacatcttataaactgacagaattgtcaagaaattctacctcgattacattttgcgaaatagtcatatacataaatatgtcactttatcatattcaagtcgtcatatcgataaatatttattacaaccatttttgtatcaaagtaatacagtttgctatgtttatacatattttttgtataaaaattagcatagcttactattttgttttataagtctgtcatttcattgttctctacaagatatattatagtaaaattttatacttttataaaacaaaaagccacgtaattgagaaacttttacattttgttagtaagaagtgtgtatattaggcatcattctttaatcattatatttgttaatcgtaataataagtcattgctaaatagcactttaatattgatgtattttaaagcatctctttaattttaaaaaagtaaatttaaataacatgctattttagcttttttgttaatacaattcataggttgtttataaatcagttgaattactaatatgcttggtttaattacgcacttttatttctagtattatcgttattcgtttataaattaacaaaagaccatttctattcgattagaataaaaacagccttttccgttcatcaagtaattataaattttattaatgttagcttcttaattatttaatttgactcaccatcgctaaaatttcgtcagtaacttcttcaatcgacttgcctgtcgtatctaatgtcactgcatcatctgcttttcttaatggtgatatttcacggttcatgtcatattgatcacgagcttcaatatcacgttttaaatcttcaaaatttgattcgatacctcttaattgattatctttatatcttctttctgctcgctcttcaactgatgcaatcatatatacttttaaatctgcatctggtagcactacagttccgatatcgcgaccatccattacgatacctttttctgcagctaactctttttgttttttaacggcgaatgaacgtactggctctttagatgcaacgtatgaaacatgttgcgtcacatcattatttcttaaaaagtctgttacatcttcgttatctaaaatgacacattgacctttatctgctttataagttaaatctaatgttgtttggtcaactagttttgcaaagtcctcagttttgtttaattttaaatatttgtatgttaatgcacgatacattgctcctgtatcgacataaatcattgatagttcgctggctacacgtttcgcaattgtactttttccggcagcagctggaccatctaatgcaatattaatggctttcatgcgtcatttcccttccttgtcgttttatgaataatattttatcataattaggtaaattaaatataggaggaaatatatgaaacatctacttgttattcatactggtggcaccattagtatgtcacaagaccaatctaataaagtagtaacaaatgatatcaaccctatttcaatgcatcaagatgtcataaatcaatatgcacaaatagatgaattaaatccttttaatgtaccatcacctcatatgacaatccaacatgttaaacaattaaaggatattattttagaagcagtaacaaataaatattatgatggtttcgttatcacgcatggtaccgatacgttagaagaaactgcctttttacttgatttaatattaggtatcgagcaacctgttgttattactggcgcaatgcgctcgtctaatgaaattggttctgacggattatataattatatttccgctattcgcgttgcctctgatgaaaaggcccgtcataaaggcgtgatggttgtatttaatgatgaaattcatacggcgcgtaatgttaccaaaacacatacgtctaatacaaacacatttcaaagtccaaatcatggtccgctaggtgtattgacaaaggatcgtgtgcaattccatcatatgccatatcgccaacaagcattggaaaatgtcaatgacaaactaaatgtaccattagtaaaagcatatatgggtatgccaggtgacatttttagtttttatagtcgagaaggtatcgatggtatggttattgaagcgttaggacaaggcaacatacctccaagcgcattagaaggcattcaacaattagtatctttaaatatacctattgtgctagtttcacgttcctttaatggtattgtgagtccaacttacgcatacgatggtggtggttaccaactcgcacaacaaggttttattttttctaacggcttgaatggtccaaaagcaagattaaaattattagtcgcgttaagcaataatttagataaagctgaaatcaaatcatattttgaattataatgaatacgtaacataaaaaggtctatgtacaatcattagtcatcaacctcatttgacatatcatgaatgtcagtcgttgtaaaactaagttatttagtacatagacctttatttttatgattctaagggcgtttgtttcttagctagcatgctttgagcaataatgcccccgtggaatttaccattttcaataaaaatggtattcgcatcgttccctgcagcaattacacctgcaatatagcaattttcgatatttgtttcgtatgtttctttattatacataggcgctgttccaaattcatttgtattaatttgaatgcctacagattttaaaaattcataatcgggatgataaccaatcatcgcaaatacataatcattgtgtatcgttttactttcaccatttacttcataagtcacagtatcttcagttatttgggtaacattagcattaaattccatgtcaattttttcatgatttactaatgctgtgaaatttggaagtatccacggtttaattgaaggcgaataatctccaccacgatatagaaccgtcacgttagcaccagctttttccaactccaaagcagcatcgatagccgaattcttaccaccgataattacaacatcttgatcaaaatacggatgtgcctctttaaaataatggaacactttaggtaaatccgcaccttcaacttctaatgtattatgctgaccataatagcctgtcgcgattgttaaaaatcgacattcataaacatctttcgtcgtagtaatagtaaatttattattcatttttttaacagttaatacttcttcaaatgcatttacttttaattgatgatgttttacaacttctcggtaataaactagcgcttgattacgtcttggtttactttcttcaacgataaacggtacgtccccaatacttaatttatcacttgatgagaaaaatgtttggtgagtaggataattgtagattgattcaacgacattacccttttcaataattaaggtatcaataccttttcttttttgttcaatagccgcacttaatccgcatggccctccaccaattatgatactttcaactttttgcattgtttcggcctcctttaatcccaaactattataacagttcagtgattgatgcgctaagtctgtgcttgaagatttatgatatatttttgacaatttgtttaatgtgcatagagaattgttagctacggagttgaataacactacaatttaatatgttgatttattttttattcttcctcgttaaatttgttgattgtggtgttttatctttttgatgactatttaaaaagtttaattgatatgccaatattcgagacaagaccttgttaaataacaaactttgaaaaatgaaaaaaccgctacatacttataagcgcaatttaagttctccaaaatatttagagatacttataatatgcacgtttgtatatagcagttcagttacaatttatatagttatattatggaataacgatttgttgaccgtttctaatattgttaccacttaaaccattggcacgtctaattttttcaacattttccggtgaacctgaaccgtagtattgaattgcgatacggtataagttttcttgaccattcactgtatgtctttggccaccaccttgacgttgttgttgctgttgttgattttgattagcttgttgttgattttgattattttgtgcttgattgttcgcttgattagcgttgttttgatcattatcagattcatctttagtcgctttgtcttgatcctcttttgatttatcactgtctgtagattttgatttatctttagaagcgtctttagatgtgtctttgtctttactttcatcagcattatttttatttgtattcgcgattttattttcttttgtaccattattatgattgtttaatgccatgcctccaaatatcgctaatgcaccgataattagtacagctgcaattaaaggtaacaatactttggccatgccaccttttttacgttctttatctctgtcatgattgtcatgttcatcatggttttggcttgcattattagaggcatgtggttttgaagcggcagaagcacttttacttgctgcgcctccagccaaacctgctgttccagcaccgatcgctgcaccttttttgccattatgatgatctttagacttatcttgagacgctttatcctcagtcgagttattcgacttgtcagaattacttttgttttgagcgtcatttgaatgtttcttagctttagaaacacccattgcaccagctgcacctgcaacacccgctgttccagcaccaattgctgcgccttttttaccactatgatgatctttagattcatctttgtcttgcttaacagttacatcatcatgtttatcttttgatgtatttgcttggttagcacctgttgcaaaatatggtttaggttgctgagattgttcagcttcactcttatcagaaactgttgaatgctcagtgttattttctgcttctttaatagtctcgtgtttatcattgtcttcgattggttctggatgtgatttatccattgcaaaagcattcttattataatattcctcttcatgttgaggtgtactgtcttgatggctaggttcttgactttcagtactgtgtgatgattcgacttgacgatcatctattgtgccagcctcattttgaacattgtcttcagatgtttgtgattcattgtgaacttgtttattatgattcgttgctaaatcacggcgtctttttcttctttgggcatttcttggcggaaactgttgctccgtattctctattgtatcctgatgttctaattctgattggtctttttcaacatcttccgtatggtcttgatgtgaatttgtgtctatcgattgacgatttttttcaaagtcatctttaaaattattagacatagccatcttcctttctattctattacaatgattttacataaaatatacccacatgacatatgtttatgtatatttttcaaaattatttcaatcatttttcaattgtgtatacactaattatagcttgtcaattttcttttagtaaagtaatactatctgagaaataaattttgcaacttttcatcaaatccaatacttctaattaccttcttcttatttaaaattgcgatatcagttatattagaatcattgtcacaacatcgatcttgtgccggtggatattcaccgaaaaattctaataaatacttccgtctacattgatccaatttgcaatagccaatcatgcgaaagaatcctaattgctttcgtttaaatgattgcttaaatatctgtttcaaggcgccgatactatagaatgattgcaacgttgtcaaaacggcttgtttatcgggagctaaaaattctcctatttcgaaattttgtacatcttcttctgttatcatatctgcaaataataacgtttctaaaatatatttatcgtccggttggaataaactaattgcctgacttagttcaccatcgcgacccgcacggccaatttcttgaatgtagttagaaggacttgttgaaagatgaaagtgaatgattgtgcgaatatcttttttattaattcccataccaaaagcactcgttgcgactataatcggaatatcattatttaaaaattgttgttgaactgtgtgtcgctcttgataattcatatcaccatgataaatacctgtaagaaaacctgaatcataaataagttgcgctaaattcagacacatctttttcgatgagacataaataatcgttggtcccgactgttgtagaaacggcagcaaccattcaattttatcttcatcatcatgaaaattaagatgcttaaagcttatatttgggcgattcattgtagttttaataacattgaattgaatcgctaacatttccgtcaaatcatcttgtaaatgcggtggtgcagttgctgtcaatgctaagacaaccgcttctttaaaatgctttgttacttttcctattagagcataatgtggtctgaaatcatatccccattcagataggcaatgtgcttcatctagaacaatcatgccaaagtctatcatagatattaatttaaaatttgacggttgcaggagaaattctggacttagaaagatgaagcggctatgtcgtaaacatttaatattatgctttttctcaatttcatccataccagagtgaatacatgttacacgtttttctccatttattttcaactgcataacttggtcatccattaaagatattaacggtgagataattaatgtcggcttacctgataaatacgtaggtatttgataacacaaactctttccacttccagttggaagaatacctagagtgtgttgttgagacattatactttctataatttcctgttgtcccggtttaaaattctcgaagccaaatttgtttcgtaaaatatcatgcaacattcagatcacctctttcaaatccaacgattaatacttttaattgaaaatatgataacgtgtcaaattgttctttgtaaaattttaatcgttcaccacgatgttgttgataaaaatttaaaaattgcagttgatcttcttgttcaacataatcatcgtaattagacatataacctttgattaagatttcaagtacatgatcttcgatagtattgattttaacttgttgttgagccgctatatcttccatcgtgaattgttcaagcaatcttgtataagtaatataagtttggtttaataatgtaggtttcattattatttttgataaaatagtatattctccactttctaattcaaacatcattgtcactaaattattcatttcgtattcaaacaattgctgttgagatagcttttctattaaactaacttgctgtctcgtatacattggttcatcatagccttgcaaataataatgtaagtaacatggcccttttaaagttattgctttaaacaagttatgtagttcattttcaaaatcaatttgtaattggttttctttaatgtagttatagacaatctttacagtttcttgtatcttattattttgagagattggtacgaaacgaaaaacatgttgtttggtattagacatggtttgcactaatagttgaattgcttgaaatgtttgccccatgctttcaaatgtatatctaggatgcaacatgatttccatttcagcattaaattcattgattttttctaaaaatagctcaaaagacggatattttaatagtggtaaactgtgatataatgacaactgttgttgactacaagcgtcaaaaaaggtttggtgagatttcttaccaactaagatattgtaaatacttttatttgttttatagttaaatgtttgttgtaatgctgtttttataatgtgttgcaaatttaaccctcactctgtaaaacggataatttgaaaataaaaatgatgctgtctaaaattttagtcacattactattttagcatttttatcaaaggaggcgaagacattggcaaaatatacaatcgttgatatggatacttgtattgcatgtggtgcatgcggtgcagcagcaccagatatatatgattacgacgacgaaggtattgctttcgtaatccttgacgataaccaaggtactgcagaagtacctgaggaattatatgaagatatggaagatgcaattgatggatgccctacagattctattaaaattgcagacgaatcatttgatggggacgctttaaaatttgaataattaattttttagataaaggttccatagaaaaagcaggcaagctatcgtttattgatagtcacctgctttttattattatgtgtatattattttgctttaatttaattaaattcttttcaagaaattcgcaagccttctatatagtaaaataaatacaatagaaataacgatacctttaataatattgaatggtataattcctgaaacaatgattactttaagattatttgcgatatcagctaagttaaatatcataccgtacaaaggtaatagaacgaaatagttcaagatactcaacacgatagtcataacgattgttgcaatgattaatccagtaatcaaagattttgttgaacgtttatttttatagatggcgtaagcagttaataagaaacttgcgcctgctaaaaagttagcaaatggtccaactggatcgcccatactaaataagtagttcaataaatttttaaccagtgcaactacgataccggcaattggtccaaacgtaaatgtagctagcaatgacggtacatcactaaaatctaaagttaagtatggtggcaaaaatggtataggaaacttgataaaagttaacacaaacgcaatcgcgctcaacatacttattgtgataagacgtttattttgttgcatattcaattttctccttccattcatctcgtaagaataggaggattattgcacaacaaaaaacctccatcttctcccatccagactatactgtcggctctagaatctcactagatcagccactaatatgatacatactagcaggtcgcaggctttatttactgccggttgggaattacacccgaccccgaagatgaatttaacattattaaatttaattctcattaattttatactatatatcacaaaacctcaataactatgcttaaaatagatcatggttacgtaattggaaagtgtttcattggtgatttgcgagcattgtttggaatgttgtttgcttgattgttttttgagatggattttgggacggcttttttgaacctaccacacaattaggtcaaaatcgtcataaaatggaaagcaaattataagaatctagtaggtcaaaaagctttatatcagtacttccatttatattattaattaaatcgccagaagttatacttaaactcttctacttatttgccttcacaacaatggtagaattatcttttaattcttgatctactcaatatacactattctccgttaaattttcatcattaattttattcttgatcaaacacaccatattctgaagtgctttcaccgttataatttggtttaatcgtatttattttattgtctgaaaattgtatactaaaatctatatcagttggtaaatctttttctttttttatttcttctgccatttttattacattttcactgttactttttttagtatagttcttatttttactaaatagagtagtagttaccgaaactttagacttatcttttaattgcttcttaacatttgacaattcttttgaaaattcactgtcacttttgtttaacaatggttcaaaatagtctctatactcagctaaattataaggtatggccgaaatataaaaatattcattttcataaccactattttgcgtcttattaattgcttcttttgtaaatcctgtatattgatatttctcttcattatctttgaaaaatttatataatttatcatatttttctttttgtgctcgatattcaaacccactgagtactgcaccaactaaagtactcatatcatcgcctttatccttacttcttaatgagctatcactgtcaataattgatttatcaaatggaatactcgcattaaatacgatgtcgtggtcatcacaatgcacgaatacttctacaccatcgccactacctataacatttgtagctttaacttttagaccgaagttatccataaaaaattgttcgcctcgcttagcaattttatctttatgcttctttgcaaattcaatcgcatctttttctgcaggtggttggaatccttgtcctacatattttgaagcatccatttcttctggtacagattttgtttctttgttggattcgttattggtagttgaacatcctgatagtagtatcgttgccattaagataaattttgcttttttaagcatatctcatcacctatttatgcgcttttaaaagtttcattttgtaaataattatactctcttaatttatttgtgtcttatagtttctctctatataaatcttcaaatacatctgcctgcttaaatcgtttttcgttaactgtaaagtcattatctttattgatgtcttgataaaccctatagctactcaattctgttaaatctctatcatttattttattcatcttcaaatgctccaaacgacactactttcttatcatcaaaacgagctttttttgtgccaataagtttatttcctaattgagtagttatagtattcttgattggcatatcttttgttctttcaattttctcggataaatctattacattatttatcttttcttttctattcctttcatcattcgtactaaacaacgttgctacagtatttgtattagcagtatagtttagctcttttctagctcgttgcataccctctttaaattctttatcatttttatgaatcaatggttcataatatttacgatattcttttaaatttcttgataaatatgtgatataaaaatattcattttgatacccgacgttttgcgtcttgttaattgcttctttagtaaaacctgtatattgatatttcttttcattttctttgaaaaatttatataagttatcatacttttctttttgcgctcgatattcaaagccactcagcactgtacccaccatcgtactcatatcatcaccattgtcattactacgcattgatcctttttgatggatggcatctttgtacaaaggtagacttgcattaaatacaatgccatgatcatcgcaatgcacataaacttctacaccatcatctttacctacaacattggtagcctttaccttcagtccaaagttgtctttaaagaattgttcacctactttttcaaattctttacgatgcttcttcgcaaattcaatcgcatctttttctgcaggtggttggaagccttgtccaacatattttgaagcttccatttcttctggtactgattttgtttcattgttggattcgttattggtagttgaacatcctgatagcagtaatgttgctattaagattagtttagttcttttaaacatagctcatcacccatttatgtgtttgtttagaatatagagaaattagctgatttcaagtcattcgacctcaatccttatagactcattatcactgtaattaactcgattagtactaatagtagattttgctagttgtaaaaatattttcgtattttcaaaattaaggtgtaactttttcgtactttcagacaaatctataacatcatctaattttttgtcctttgaaaagttactacttttcgaaaacaatgtagtatgtacttctatttcagctttatagcctactcctttccttgcttctttcataccttttttaaaattcagattatttttatttattaggggttcgtaatattttctatattcttggagcgtcggtatattagcaactacataaaaatattcattttcatatccactattttgcgtcttattaattgcttcttttgtaaatcctgtatattgatatttctcttcattatctttgaaaaatttatataatttatcatatttttctttttgtgctcgatattcaaacccactgagtactgcaccaactaaagtactcatatcatcgcctttgtcctcacttcttaatgagctattactgtcaataattgatttgtcaaatggaatactcgcattaaatacgatgtcgtggtcatcacaatgcacgaatacttctacaccgtcgccactacctacaacattggtggctttaacttttagaccgaagttatccataaaaaattgttcgcctcgtttggcaattttatctttatgcttcttcgcaaattcaatcgcatctttttctgcaggcggttggaagccttgtcctacatattttgaagcttccatttcttctggtactgattttgtttcattgttggattcgttattggtagttgaacatcctgatagtagtatcgttgctattaagattagttttgtccttttaaacatagctcatcacccatttatgtgtttataaaacttttgtgtttgaaaaagctacttattctcaatgaaaacaagtagcttttaataaattaattagtaaactgctagtttttctaattgttctttaacttgaattaagtttgaacgaattaacgaggcagattgatccattgtttgaatagcttgtccttcattttcgttcaagccattacaaacaacttcaaactgttgtgccatttgatcaagacgtgcatgagcttgtgtgtttaaaataaacatatcatcataatgagatggtaaattgacatttcgtcgttgtacgcaaatgtataaaacccttgttataccaagttctttattatttttaaccttttaaattttccacaagtgtttgcccttatttaaataatccgccctttttttgccctgaaaaaataaccacgtcaattaagacgtggttaccctaatatagaaagaaagtgtttgtaaattttaacatatttaagattttttgattatctatctgtttagctcataggatttttttccttagattgagtatctattaatttaactgtatgattttcccaatcaacttcataaattgatgtatgagttgctctattttcatctttataattattacctatccagtgaagttgattccaaaagtttgtatatctatccatttctctttgataagtaacagtaatttttgatttttttgcagcgttttgttttcgagataggacaccaataaattctggattgaagttacctctggataacactggcattttgtgatattccaagaagttttgtccagcatttaagttgctttgtcttgagcctaaaaacatttcattaccataagttgaatgataactatctctgccatatggtccccaaccattattcataattttatgtgcttcaacatcccaaccaatttttttgaaattagttcttttatctaagctagttctatagctttcttgtttatagttaattgtctctgaaaaagattttgaaccattacctccacctgataagccgttagagatattaatatctccaccataagaataacctaccgtttgttgtacttgaaattcttcattttgatttttaggtgcataatctacaacgtttactgagtcattagaatctgaattaattgaaatgttgtacttagaaccccaataaaattgagaactaatagtgtcttttggatttggctttgtatagccagaataaatgtttccagcagctttgagtattaatgtatctttatcataacttttatctttaataaaattaaaagttaaaatctgagaaatttttaacttatcggaatctgatgttgcagttgttttgtacaaagtaattttatcatcaacctttttctcacttacaggtgtgatatgttgagctgcatcaactgtattggatagcaaaagcaatgcaattgatgtaacaactgatgatttgactatttttttcatatcaattatgtcctttcactttaatttcatgagttttccagttcacttcatatttaactgtgtaatttctgtttacaaatgcgttgtgtattctagatccttctaaataactattgccatagtgtgttgttcttctagtagcatgagtaacatccatatttctgccatacgttatttcaaattcacttgtatctcctgagcctttttcatgagaaacagttgcaataaatgaaggattgaaaccactgtgtactaatgggggtaattcattgtctggcacaaaatagtctctcggattttgactatatggtttatatccaacaaataaatttggatcatgtccagacattttacctaatgatgtgataaatgaattagcttttattccccattgaacactttttgaattttgatgttctacttcactgatatagttttgttgattataactaattgtttttgaataattaaatgaaccattacctcctgttgatggaccactattaaaattaccacctatgttataacctaatgtttgactaacatttactgaatctattttatttttaggtagataatttattaaatctacattagggtcatttgttttgagaccaatattgtattggaaaggccacctcattgcttttatatgatctgtgtttttgtaattgtaataagtagtctttgaattgataaaaccttgcatttttaaaatcaaagcgtctttgttatactttttatctttaacaaaatcaaactgaatattttgtgtgaccccccacttatcgctacttgtatcttctgttcttttgactacctcagcgccatcaccaatattctcaatattgttatcagctttagattcatgaaacgaagtagcaataggagtgattattcctaacgataatgttgcagctaatagtctttttttgaccataaaaatcatttcctttctttataaattttattacatttttatattaaacctttttaacttttaataaaattaaatatttattaaaagatttaccgagtttaaaatatctacaaatgtgtttttttactattatttcgaaaaaaacccgttcattaccaaacaaattataaataatttatattttgattgataataaacataaaaccacgatatagttgaccataacaactttttaatcatagcacacaatacgaacacaaaataatttatatactaaaaacgtttgtttttttaaaatttaatatattcatgtaaaaattaactgtttattaattttaaataataggcaagtaccgaagtacctgcctaagattcatcatatacaattatcaaactgcactaaacttaccaaaactgcttattctattacctgccttgtctacctctcctgtagcaatataacgacgttgtccactattagcaatataagtaatccatctatacccattgatgcaatatgctccgtcatatttgattgttgcgttattaggtaatacacctgtaattcttgaattagttgaatagccatccctcacgttattacctttaacattggcaactgtgtaataaccagtttcttttttatacggtacattatttttatcgggtgtataacctgctggcactggcggattcttttggtttttagctgatgttttaacattaccagctaccaaaccacctataggcttaccatgaatcgcaccagctattaatttagaatacaagtcataattcttcttaatccaatccatatcttttttattagtaataaaacctaattcagataaacgataattgatatttatttctgctgatacattaacgttcagtaaatcattacgaggtgttacacctcttatttgtcctaagttatttttaataacatcttgtatacttttatcaatagtatctgcattgaattgacttgaaataataacatgcccaccacttgcactttctcctgctgcgtctaaatgaatctctagaacaatgtcatacccctgtgatttaacccaatataagccataatctttattatttcctacattaacaccgtaagcagtatcttgatacatatcttgtgattgacttgagccaccatataatgcaacttcgtgacctgcatgtcttaaatacttagcgatatttggtgttatatatttacggataaaatcacgttcatttgttccgtttccgactgctccaggatcgttataaccatgaccggctacaagcataatttttttaggtttaattactgcttgctttttggcagttgcttgcttaataacgcttttagctttatctccaacacttactttatctgggaaatttaatctaataaaatacattgggtcatcgtaataatgaacatgtcttgtaacgctttcgggaccccaaccaggttgcgcaacgccatttgtccaacctttaccattccaattttggccaaacgatgtgaaagtgtttagattagcgctctcaacaatttcaacatgtccagctccgccaccatactttgacgggaaaacgacaatgtccaacttttgcggtaaaaagctatcatagtttttaattatttgcccgtatttttcaatccttgctttattatcaaatggaatattataagcgtataaaccttgtaacctttcgcctgttgctatcataaaaaacatatttgcgtaatcgtaacactgaaatccataaaacaaatcaggattgaactgcttccctaatgaattatcaaaccatttttctgcttggttttttgttatcaacattggtcaacacctaccctaaatcatttgtgtcgttcatattcgtaggtgtcattacttctttaattggcgcttgccctgttgcttttctatacttgttttcagctttatatttctttagcttttgatttgcccatttaccttcttgagatgttggattgtctttatacgtagtatataaagcaacaacagtaagtattattgatgatatagtctcatcgtctactggaatcgggctaatacctttgttcgctaagaattgatttactaatgctaagatcaatacgatgtatcttgttattacttttgcatccatttgtttgctccttttatccaaaataaaaagccagtgccgaagcactgactcttaactattacttacacttactaaaccagaaacacgaccaaaagctatatcctaaaattcccttaagcatggtaatcacctcctttaaatgccaaaaatagtttttaacaaggctataacaaatgtacttagaatcgtccctattaatcctagaatccacatcttgatgtctctaatatttttagcatttttctctttatttttttcatcttcttctttgtcacgccttagttcttcgaaatttctatctaacttgtcataaattttttcttgcgttctcagactgtcttctattctgtcgaatttttcaaacatagtcttatcattttcttctaatcgcgttaaacgccaatcttgttcgtgtcgtttggtaaatccaaacattacaccacccactttattcaaattaaaaagccataagattataacctatgactctagattttctggatacttttctcctgtaataattgcatattcctctttatctataacttccatatctacataccacgctatatcttctttactatattctttcaattgataccatgttttaatatcttcgaatgttggtgaaattaatttaagcattttcagtctctcctttaacctcttctaattttttattaagtgtcacaagttgttttgccattagtgcattttgcttattaacttgcatcgataactttgtactttgaacaacttgtttctgcatactagcaaccatttttcgtaagatgtcatcagaagcgactgtgttttgttcttcactgtcaatctgttgatgcaagtcatctttttcttctgaataatcttcgttaaaaactatttccccatttgaatatttaaaggctttaggtctaaaaacttgagagaaattttctggtaaattttcaatatcaataccttcttcaaagccaccaatgatagcgtatgaaattatctcattacgcttgttaactaatatttgcattattttctcactcctataattttgttgattgttcctctatttgcattggcaccagaacctctttgacttcctaagtcgaaataaacatcgttcgatattgttaaagatgtacgactagatttagttaacccaaactcataaacgcctccaccgttaccgtcattatccggtaaatttgatgggttcaatgaaattttcccgccaccaaaggggttgccaaactcagtaaaatctccccctggaaaagttccataaaaaattaacaaaataaattgatctaaactttcattaagatataatgttgagccaacgccatttgccgtcccatcaaaaataactgaatatcttttattaaacttgtcatctgtgtatagtttggcgttgctttcagccgtattagcttttgattgcgcgttttgaacagtttcaaaaggcgtattgtaatcattaagggctaattctgaccaatcagaccaagaacctgcttcttttctcttaacaaatactttatttgtaccatttggacgatatgtcatacgtttgtagtcggaagttactactaaatattcgacaataccattagtgcttacgcctcttggataatttatggcttgtgagacgtaaataaattgggttgaatctcctactctttgttctggattattaaaatcaaatccagtaatctgtgttattttaccgtcgtctttagtaatcttagatttttgccaatttgaagttgaaccacttgtgactaaaccgccgctattcactgactgcttgaaagcctcatgtttctcatccatatatcgcttttgctcatcgaatgttcttgaataagcttgcgctttattctccaaatcggttatacggctattagcgagttgctttaattcatctatacttgacgattttgctatttgaatatctgatagccctttttctttagctttttcaatcagactcgcataatcttcaccattttttatagcctcgtccattgctttcgcacgatccataatagttttttctaattcttgaaactcaacaatatagtgcagttttgtttcagagggaatcttgctaaacaaacttttttcaacgttaaatgtgatagttctctcgacaactaccacgtctgaattacctaattctgcaaccgaaacttgagcttgataacttccatctcgtttaatcacatcattaggtaattgaaattttaatatacctttaaatggatctaatatttctagtggagcaactaccatgactcctttacctcgaatcgctattcttgctttgatattttcttcactcaataataaaggttgattatttttagtgatattaaaaagaagaacagaagaatcactctctcctgttctaaaagttatatctagatttgaaatattttcataatgcgctgtattctctaaattaatatttacagatttttctaaattactcattaacttataattctcccttcgtgtaaagtccatggccctgaacttgttttgctatcatagttcttcaatagtatttcacaagatgctgtaacactattgcgaactagcctatgaacaaaaccacctgtgtttgaagcttctacatataagttccaaccagctacccctttacgttcagttggaaaatctgtaaaacgttttgtatcatccgtagttaaataaaacgacatacctactatgttaatatctgacatttttgtgatgaatgaaggtactctctcccatttaccactatttttaggcacataattccagtccgaaatgtctccagttctcccagaaagcaccctttcaaaagtcatcatgtttcttgcataactattacgcgttaatatctgaataacatctccaccagtttgtggtggttttacttccaagaaccaacctgcatcgcgccattctcttggtagtgggaaatcgtcaatttgaactgtatgatctgtatataaataataaagaccaggctctgttaacattccaagatttgttagtttatcaggtctcattggtaagggcttaactctaccgcctgtgtcactcatgataaaagggacgcctctagagtgcagaatttctaaaatccctctttggccaatcatgaaaatacgatgtgttctatttccatcgccaccaacagtaacacctagcatcaaagcctttttaccgctatctttatcatagtatatttgtagaccctctgcttccgcaaattcaccaggaaatgaatcaagtgttccaccataatcagcattaacttgatatgcttcttctcctgtttctaaatcgaaagccgttaaatagtttctattattcggattactatctcctgtgtaccaatacaagtatttttcatcaaaagtcacaccttgcattggctgagtttcatttgttagtctcataggaatgctaattttatacaaaactttatcaatgttcttatcaacatcgtctaaacttcttatctctatataattcatagagttttcaagttcccattgacttctaggtctctcaattctgtatagaattttattttctttttcatttatgactggtgtgatataaggcttttctggatgtcctgtaaatacgtcttgcataccatacttgccataactaatctctacattaggcgtgtacttaaagcgaactaatgtgttttcattattaccatttaaaataaaactatatatccataactcatcatcaatatatctatagccgttgtgcgtaccatgacctccgcctacaattaatgagctatctataaattgaccattaggtcttaaacgacttagcatatagccgttatttctagcttgtgtcatgtatactatgcctgttctattatcaaaccagaaggattgcatcactgcatttgtaagtggtgcaagttctgttacaaataaaaattcttgcttatcaggttcaaaacggtactcgatatcaagaatttgttgtttagccttatttagttctcttatagtttcttctttattattttgagttttggtttcccaatcgtctaaatgttcttttaatgtatcaaaggtttcgccatttacattaactcgagcttgaacaatctcattagcgctattattacgcggtgccaaaacaagtgcgttaatttgactttgtaaagatttatttactgctgcttgcgatctaccattataataaatttgctcagcgaagtgttgaattgttttagctttctgatgcaacttaaactctgttgtcaatccaagcgcaaattgctctattctttgtaagttttgtatttccttagctctataatctcgacctgctaaagctcccaaatcctttattaaatacaaattttccataatgcaccttcctttctaataaaatagcactgtaccaagtttcccactatcgtcaactgttattttccacaatttaccgtttggggatttctgtacaatgctattttgaataattcctgcttcgcctatttttaaattatctaatttatttttatcatctaccgaaatgataccgtcttgaggtagtccatcaatatcactactccctgcataaggtaccccgtttatagctttccaatgtgtagctggaaagtactgtttatcgttttcaagtagcgctttgattttaacttcttctgttgccattatattaatacactccctatatccattgtctcgaaaggagaattcaaagtactagtgtataaatgatttatacgatttgcttgatagttatatctattatcttgtgcaataactcgtctgttaagcgcttgttgaatttgtaccatatcttttatttcattgctgaaagacacttcatctattgcgtttacaaatgggtgtgacctatcaagtttaacaacctttaattcagtgttatatcccattaattcatgaacaaagaatacgctatctcttggctctattttttcataacccatataattaacatctaattcagtcttaggagtatcatttatttgcttttttgcaaattctagcaacttatcctgtgtttcgatatcttcatttgtttgcgtattagcatatcgaatcccaaactgctttgcactatctgcgacgtagtcaacaattgctttgtattgattgcgacctgaattgtcagcaattaaatttaagactgttgattttttagttccaacgtacatacaaggcttagcttttttatttgaagagatatcaattctatttttggggtcttctcctaaaaatatcatttctaaaacgtgcttgcctttatcaatattttttattaaatctattgtttcagactgaaccgacttagcaaaacaagaaatttgcttaatttgcttgccgtctaaaatcaacttatatattccaccttgggaaccttttttgattgtaaatctaactgtttcattaccatacttgcaatcaaagttaatagttgctttagaaccaattgtttctgtgcgataagtgccttcttttatgaaatcatttgagtaattaatgtcagttgttttaataggattataatttttcttttcctcggctgtgtactttttcccaaaaacttttatagctgttcttaattccaacgtactgacagtagcagacacagtatcagtattatattgataccttattactttttcacttctttgatagaatgtttcaggagaataaaaacatatctccgtatcatttggataaataatacaaccaaacaaatctactgcttctttacaatattctaagccatttttgttacctaattcatcaattggtatttttcttttaaaatctccaattattttataggtcatcttgactgacgttttttgatttgcaaatccatatcttaagtactcatctaaagaatattctggtattttaccagtttcgctagtgtcgtcatcaagcttatttgattccactgagtgattttgaaattcatacattatgtgatatgccgtaacttcaataaaaactttatcaccttcaacctttggcgctgtctgcttaattgtgtatttttcaccatgataaattatgaagttttcacaaatcaataaatcaaaaacaaaactattatgagtagttctatacactgtaaaggtgatatacctagcttcattcagttcataatattctttaaaagaaccgtaatctacgtctagtaaattttcacaaatcaattcattaaaatccattactgataaatgatcatgataatccattaaatcacctacctataaataaaaggaaacttaaatgttgttttaatatcactgacgtctcctttaatcttaaattcatttttacctggcgctaatgttataatgcccctatttgtatcaattccgactctatttatatctcgatatgcatacacaccatctaaaacaaaatcagtgtttttatctatgcttttcttgtatttaaaaatatcacctgttgtatagttaaccagttcaaatcctccactcgcatttaaattaattaatatttttaaatcgtgcttgaatcgtggatttatcgtatcagtagaaccgttccaaatagtgaattgatttgatgtatgagtatatttaggtgtgaaatcaataggaattccattttcaaacatccaattagagtcgaataagaactcgctatcagtccaattaactgattcagaatatcctttataaacatttaaacttacttcaatttcagttgaagaaccatcttttaaattagatgtaacattagctgtattcactgcgtatttaacgccaggcatttgagaagtaataacataataaggatgtctacgattaaatacagatctaaaccaatgctcaaataaatttaaatctataacatctataccatcatagccaaaccttaatactaatgaaaaaggcgcaaaactaattgcgcccggtaaaataccatctactccgttaatagttacactattatcattagtgttaggactttcagcccttgcatctaaaaatataagttgattaaaatctgttattacttcttccttgtaaccatctatgatttttacaaaagattgcattaattagtcaaacctcccatataattatttgcatttgctctatgtccactttgttttgacaataccttttctaaatctctaattgcatcactagagcttaagttattatcctgagaagaaacagtttgaatcaatgcatctgttaatttatttcctttatccgttagcataacaatttgtttcaataatttttcaaccgtagaagtatcattatttacagtgatgttattttgcttgccatccataccgatgatgcgcataacctgttcagttaattgcattgctcttttgcgtcgtgtcaacggaataaccatttctggtttatctccttcccccacttcagcgatttgatgtttagttataagacctccattcgcataggcataatctcctgcgcgtttaaagcctccccaaccgtacttagcaacaatgtatttcattgctgaaatcgcctcatcagtaggattataaatatttccatgtcctggcttagcaaaagctctaaatgaaggttcaatcatttggaacatacctttagacggtgtacctgctcttgcgttggaatcccagttgttaatagcatctgcctgatagttactttcacgcttggctactcttaacatctgagtagtgatatagtcagatctatatcgtccacctaaaattgattgtgctcttagaatagctctttttgcattctcgtatccgcttccgccgaccttgccaccgccacctttaagtgacttcaaccatttcataggatctactgctgtatcattacctggatgtgaacctctcatcaattggaaatgtaagtgtgctcctctaacgaaattacctgtagcaccggatttccctatcagttgaccagctttaatacgttggccttgtcttgctaattgcttagataaatgcatataccaattccattcgttagcaccggtcttaatttgtatagaattaccgccaccgtaatcagtccatactttatcagctataccgcctttaacagcataaatgttcgttcctgtaggcataccaaagtcgataccatagtgacgaccgccattaaagttaagtccacctgtgtaactcccaaacctttgccaaattggatggtcaaatagatagcttccatcgcctccgccaccaaaatcttcaaaccacgattttactttgtctactaatttctttttgagcaatgagtacgcgcctttagcaatttttactgtagcgttagctccgcctccaaaattaatatttaaacctgacattactttatttactagtttccctggatgttgtacataatcccacacatcgccaattttatcgcctaaccaagatgcaccatctttgattttatcgcctgccgcttcaaccatttcttctgcaccttttttgatattatgagctgtgtttttagctttagaaccgaagtcccctgcttttttaccaagattttcagtaacttgttccatccattttttctttttcgtaccaccatggaattttggcaaaacacccatccgctgtaacttcagagtgtcattggcatttattacactatctccaactcctagtggaacaaccacatctcgtccttggggtgcatggaatgttccgtcagctctgtgaattacttcttgaactccaccacctggggcatttccagaacctctatcatttaatacagcaaatgtcggttgcgttaatgctcccgaattatcggtagctacaccttttcctgctaaagtaccagtagacaatgtaggtattggcttgatgagatttttatcagtaatggctttagatattttattaataccgccaatcatgctattcaaaccgccaatagctttattagcaacatttttacctaaatcagccgcagctctgcccatgtctttaccaatatctctaatccaatcatatgttcttgatagccattttctaaaaccattaaatactgatttagcgttagaccatgccgaacttgaaattgcatcaaaacgatcgtgggctcttgaatacatatccccagtccaaccttttaaagatttgtatgagttactaaaccatttcgatgttcctttccaaacggattttgcattcgaccatgctgtactagaaatattatcccatttcgagcgcgatttattagccatatccgttagccagccctttgcacttttatatgcattgctaaaccattttgatgtgcctctccaaatagattttgaatgcgcccaagctttatctgaggcatctgaatacttttgcttagtttgattgtaaatacttcctgtagtcgatttaacagattgccaagcttttccaaaccatttaccagtactattagctatagccttagtgtgatatcctacagaacttttggctgagctccaacttgaacttaatttgtttggaatccctttgattccactccacatttttttcatttcgccgccaaaatgattagcatttcttcccattttactaaaggcttcgccagttttagtttttacgccgtcccaagcatttccaaaccatttctttatattttctctgtttctatgagctgtttcttcttgttctttagcgtatttatcacttttcttcttttggtcttctctgaagttagaccaccaacttttaagaccattccaccacttttcagtatttttatatacacgaccactggataaatccatctctttatcaatatctttattttgctttttaacaacgtctactacagcatcttttttagattttgcctttcttacttcatccttatgtctttgatcagcaatagctaacaatttatctttttcagacttagaaaggttgacgttattttttatagcaatgacatcatcttcatactgcttgtctacttctttttttcttgcctttcttgctttttctgcttctttaattgctttgctcgcttcgtctattgaataagcatttctgtttctttgcattcttactaaaatacgctcttgctctttttcagtcttactcaattctttaacaatgatgtcacgtctttgattttcaagcttttcaatttcttttctttcattttctgaaatctgaccatcactcaaagctttttctttcaattctttgattttctgattgagttcttgctcttttttaattcgcaaatcatttttttctttagttcgagttaaaatgttttgcttttcttgttcatcgaatgcactatacttatcaataagttcttgagttttttcgagttcctttttatttcttttttctatttcagctataaggttattagataaatccgtttcaattttcaaaagtttttttgctttgtcttctgttatttgacccgagtttaaacgtactttttccatgattctgttgttctcttcagaatagtgtacgtacttttctaaagctttttctgtttcttttgaaacacctttccctaacacttttacagtatcagatgcttttttagaagctgtgcccatggtttgcataaaccctttaaacttgttgactcctactttcagaaggtcatcatcacttaatgatttatagccatctttcatatcttttgaaaatttttctttgaaacttctccctatacttccaagataatttttaaactctccgagctttctaacagcaccgccgatgattttgccaccaaaaaactttatagtttctcctaaaccgttaataccttttctgaaccattccacatgatcatatgtggtcttaaaaactttataagcaattgtaatagcagttattgttgcaccaataggacctgttataaaacgtaaagctattcctaaacctctagctccaccactaaaggcaaaaacacttttagaagctaatcctattcctttacctaaaagtttaaaaggcaagattgctagatttgcagtatttttcaaaacatttataggttttaaattaaacaacatagctccggctaatcctttaaagccttttgacgtttttcctgttgtagaaccaagaaataaggtttgaagacctaaagatttcattgcttttgaattggtattagaaagtattgtattttcagcaatgcgtctatttaatgatgcatatcctttggccgcgcttccaactgcacgtattaataagcctccagcaagaacagcaggaccaatagatgcaccaaaaattgctaagcctaccgaagcctttctaacccaaccaggaagatgtgtaaatccatcaactaattttgttaatccttccgcacctgctctaatcataggcgttaaatctttaccaacttcaattgctaacgattcaaaagcgccacctaattgttccagagcgcctttgagattatctttcatcaaatctgctgcttttttactttcgccattggaattctttaaggatttactatagttattaattttatctggccccgcttcaatcaaggctaaaaatccacttgctgcttcagtaccaactattgtagccactgtagctagtttttgttctcgtgtcatgcctttcatgttgtcttggaactgtctaatcaattcgcccattccaacaaactcacctttagcatcagacaaatgaatacctaattttttcatttccttagctgtacttttacttggattagctagcctaataaacgaagctcttaatgcagtacctgcttgagacccctctaaacctgagttagataaaacttcaattgctgcagaagtgtcctctattgaaactcctaatgcttttgctggagtacctgcatattttaatgcatctcccatatattgaatatctgcagcactatcatttgctgatctcgcaagtaaatcagcaacatgatttgcatcagatgcttttaaaccgaaagagttaatcgctgaagccattacagttgcagttgtagccatttctgcaccacttgcttctgctgcgctgataacacctggcatagcctccattgtttgtttggcattaaagcctaaagctgccaattcttccatacctttagcaacttcgttagcacttttacttgttttagctcctaagtcaaccgcttgattagacatgctttttaagtctttactgcttgcttgtgcaatcgctccaactcgagacatttgcccttcaaagtctgcactcgtttttaatgctgcacctaaacctaaagtaatcggtgtagatacgcccatcgtcattgtacgtcccagggaagtcattttgtttccaatagaactaaatttctttgacatgacatccgcttgacttgcaagtttaccgaaatgactttgagctatcatttgttctttgttaaaagtcttcatttcggatgaagctttatctattgaacgctccaaattatttaaagcagctttttctttattaacagctgtttcaacttttgcgacattagcgctatgattcttaatagtattgtttaaatcattaaattctttttctgtttgctttaatttagtattagttttagcgtaagaactttcaattttatcatttgattttgaaagattgtcattttgcacttttagtttttgaacttgattgccttcttgtttatattgttcaacaagtgctttatgcttagcggactgcttctgtactgcgtcacttgctctttttagttgtgcagtagtagcttggttactattcttaagcttttgttctgcatctctcaactgtttaagtttttgatacgcatcttgtttacgttgatttgtacgtttatattgattttcagcttttttaagttctgtattcgatgattttaaggcttctttagatttatcaagagctaatttttcttttttattggcttctactaactttaaatatgctttctcaacatcttttacactggatttagctttttggtaattagcgttaacttgtttaagctcatcttctacttgagaatacatctttttttgaactttaagcctatcatttaaccccttaattctcgcctgatatttttccattgatttttcagacttatcaaatgctgacagattagctttcatttcactattaacaacacctaattgtcgctttaaacctttcatgccttcttggacacctaaatggtctaatttcagctccaaggtcatgccttctactttttcattcatattaacctcctttctagcttccaaaaagttttcttaaatccgtacctgtaatgactttttgttcactttgtttttcttcagtctcttctttattctcttcattaagtatttctaaaagttttacatacggctgttttctgacttcagttaatgtccacccatactgctccatacagaaacgttgtattttcttaatgttcgataaaatgtcttttattgagattattcttctgtctttcccatctcttctggttcagtttctgaatcttcttcatcttcaccattgatttctcgaaatatatcttgtaaggcttttgtataagttttagtactcatcttgttcagaacatcttcttcagtcaatccttcatctttaaataaatctactaataactgtcgctctttttgtctcatttttgttgcgttaggtgcttcttttttattctcttgatttactaattctaaatactcatagcatttttctgcttcgcccattgttacatcttcttttgtatagctctctgtttttcctgttttacgatctttaatttcaaatttaatcattgtattagctccttttattcaaataaaaaagacgcagatatactgcgccttaaatccctatccgtttgttactgtcactgaaatttgtcctgacttatcgcttccatcagtagacgtagcagtgattactgaagtaccttcagctacaccgtgaattgctcctgtattttcatctacagtaacaaattctggatgttcacttgtatatttcaatattttattcgttgctgtgcttggtgcaatgtttggctcaacattgtcatcggtatttaccataattgatttagtttctggtgtaaatgatacgcctgagactagaattggattggttttgaattgaggtacatcaactttactagattctttaccattttcttcccatgccacttggtaagtaccttttggataagttgtatccgcttctaaattagataaagttactgacactttgccttcaccttgttcagaagctacgacgtcgtctcctttataaacctttaaagttttagtcataaattattctcctttgatttattttgaaagcccctattctgctgaaactgttgcagattttgaattaactgctacttcaacattttggggattagctgggtaacgaacctgcagaatcctctgaatgatcttcactgtccgtgtatccaacgaatacttttttgaagaattctgcttctccttctttaccttcatgataaccgtatacaataccttgtgatgttccatcaacatcaacttttctattcatccagtcacctgttaattttgtaggttctggggcttctgctttttcacctcgtgttttaaattcaattgaatctaaactaaaagtacctttaagtaaggctacatataccggctgacctgttaaaccatcttccgattcgccaattactgttacatacggtgctcttgtattctctcctacccaagatgtaccatttttatctttagtacgtccaataactgtgtttaaatcatcacttggaatattgaaaatactcatgtcagacttaacttcattagtaccttgttttttcatccatacacgtttgttagatgcaaacatatctactaaatctggtgctaaacctgtgatatttaggtcaactgtaccacctttttcatcttcccatgtcatgcgtttaactacttttgttgcttctgggttaaaaactccaacgtataatcttttaaaacctactttataagaaccttgtccttctgccattgcttatttcctccttaaaaattaaaaagcacacctattcgatgcgctgatttttataatatatatttttgggtatgccttgatatcgtctcgacatcacataacgtttagtttcttcaaaataagcatctaactgactagatgcttgaattaaattttgttgatataacaggtatcttattcgttttgttatatcaattgttttctgattatttgaagattctacatctatttgaattaagtattcttcactaagatatttatcagacataaagtctgaaggtaaatcataaataggtgtaataacaacaaaaggtttggaattttcagcattttcagtgactttataatagtatattctagaatttatatatgtttggagctctgcatcagataataaaattccttttacagtgtttaatatattcatttatctggccaactccttttttataatttctctatacttcctttcactagcagctaatgtttttgcaataactccaaaacctcttggtgtatattttttaccatctcttgtataaccatgttcattcaagtgaataatgtttttgcgattcataggacctacccattcaattaaaacagctctttcttgactgccaacttttgtataaggtttagatttagtcatttcttctatactagcacccgtatctttaaaactctcgaattctttctttaaagtctttataaaaaattcagatgctttatttaaagctctatcactcttagcttgcattgcttgtttaccgtataccgattctaatttcttcaacacttcaggtatccctttaatttctacactcatttttctgataaaaccactgtattatagccaatatctggtgtatcaattcttatttctacaatgttgaataatttatcggaatataatgcactgtcaattttaactaagtgatttgtttgtggtagatattcaattttagaagacctaacaattatggttaatcctgattttgattcagtcgtttttaaaatttctctatctttcatagaaggattatatattttacaaaagcaactatacaatttcattttttcctcttcatctggatatggtcctttgtttatatattgaaaaaaatacgcgcgatctttaaattcattaaattccatttaaaaatcacctaccacttttttaatttcaaaatcattttttgcaatcctttttcattaaacaccttgcttctagattggtcatttgagtacccacgactttcataatctcttgcaatgatatatttaatcgctgtacaaaaaagcgggtattccaagtcatctttgtcataatctggaaccccacttaatagtaactcagacttagccgattgaatgagaccctcaattaaatcatcttcgaaactatagtcaattctcaaccacaatttaatttcttctaaactcatttcatcacccctattcggctgatattacagctgatttagccttagctgttacattaaccttttggggcttagctgggtaatggacctgtattttcttttgcttttgcaattctgaatgcactgtctaatgtacgttgctgatcataccatgctgttaatacaaacaaatattcgccttttttaacatctttatcagtgtcataagttgttccatcatagttaattccaaaataattgaaatctcccacaataggtttaactgctgcatctgtaaatactactggtttgccaaatactttttctgctggtgtgtcaaagaaatttgttgttccatttgaaagaacactaataattttgacataatctgcatatcgcatataaattgttgcgttatcacgataatcttcatgtaaatctgctaaagcgttaataatagcatcatacatgtctgctccctcaacttctttaacagatccattataaaatgacatgtgttctaatccagatttaggacttactgctaaggcatctttacgctctttagctgctaatcctgattgtagtgcgttttcaacccagtttactaaatctacatctgatccatgaattacagtatctgaaattgcagcaaatactttgaatttattagtagtgaacttgactgtatcaccttttgcttttaattcttttgctgtttctacgtctgtaatgaaatcatcatcgtctaaagtgtatgaaactcttggaatctctaaacctttaatgttagttagacgagctttttcacgtaattggtttttagcaaatggttctgaaacaatttctttagaaagtgtttttggtaagagcttatctccacctgaatcatttcctgttggtaaagcgtgtaataaacgttgtgcctccattgaaggtttttcaaattcatttggtaaaatcgcgtgacgataaaactctgccttagctttaaccatcttctcattatcacttaaagattgataagcttctcctttatctttaactttcgctttttctttctcttcaatgtcttgcacttgtctttcaacaatgttaaatctttgttgtaaacctgctttttctgtttctagttgtttgatgtcttccatatcaatatttggatctgttgctttctgactcaattcatcatttttattttttaattgttgtccaatcatacctaaggattgttttaattcatataatgtcggcatttcatttcctcctaataattcattgtcatttttaaaatttcgcattcgcgtttaattttttctcttttttctttttcttctagtgacatactttctttaggtgtttcaaccaattcagatgtatctacatcatcaattttagtgattttgtctacatctttctttaaatcttctgggacgttctcgaaacgcttatattgctctttagagatactagcagctatttcattagctcctaaaatttcatctatcaagccgaaagacaaggcttcttctgcagtaagccaagtttctgcatctaacatctgttttaagtgttcttgacctaaatcttttgctttatctaaataagctgaattactaacagcatctgttttttcaagtaaatccgctgtctttcttaattcttctgcattacctacagtcataacccatgaattatgaatcattaaaaaactatttttgtgcataaaaatagtgtcaccactcatagcgataacactagcaattgatgccgctaaggcatcgacatagatattaatttttgcaggatgcatttttagcatattgtatattgcatgcccttcaaatacactgcctccagatgaatttatatgaacatctatttcactgatgtctcctagttcatctagtttatttttgaaatctgtagcagttacatcactttcaaaccatttatcacttacaatatcaccataaataaatatttcacctttactttttgattttcttttcatttgaaaatacttagctttcattgacatttttatcaccacctttcaaagattttcttaattcaagtggcgtgtcaattgggtataaatcaccgcttattagcggcttatctccaccttcaactggtggtaaatcttcccactctctaatgtcatttatagtgtagtaaccactacgaactgctttaaagtacacttctgcttgtgttgcactatcagcccttaaataagatttaacgttaaatttaaaatacctatttttttctctgtctgttttagtaagtagtttccgattaaattcttcttcatactgtttgacgattggcaataaggtatgctgcaagtaaaatctgtttaactcttcatttttcgcgaaatttgtatttgatcttgcatttaagaatactgagggcaattgaaaaacgttagctactctttctcttgttaaattctcgcttgccactatatcttcagagacatattttttaggtaacggttcgatttcaacaccaggctcttggaataatattccaccgttttcttcatagtactgtttgaaatcttctaacacttgctgccttttttctttacctacattggaaccatatttaagcatgaaagaatcaggtttttgcatttctgtaagattaaaggttcttactgcattatcaaaatcagttgtattcttcaacacatcaatcggactaatgccttgcaccatattagatgccacgatgtgtttaaaatgcaacatgtccatattatgaacaatcaatttatttccagttgcagcatgaatggaataataaagttcacgtgattggttttcaattaacatttcaacaacatctggatttaataagaaaagctttgatggttgatgatagatgtctcgttcaattagcacatatgcattacctttttcatttctgattgtttcaatttgattaataaaatcaaaactgctcagagaattattcggtgacactgtaagtaaatcagatacttctgtattaactactttataatcttcatacattttcaagggcaaactagccatcgaattagataactttgtaatagctgaaaatatcgtttcattagtttcaagcgtattattaattacaccccaaaaagatctatttttccatgggctaaagtcataaagcttagaagttgactgatcaatccaattgtctatcaattttttctttatgcgtgtgacaatattctcttttgcgataacattcacctccttaacgcattatgtctttaatactaataaactctatgtttccttcaccactatcagaaacaactttattcataatatctgtatatgtgtttaaaaatgctgcaaagccatctattttacgatatctgctttgcttagacggcaaccagtttccgtttctgtctagtttcaactgaacattattgatataccatttcattaaaggattattattaaatattattttcccatctaaaaacatttcttttaaatccttcaatgcagggctcaaggtcaaagctccttgtcttgtttcttccgtttcaaacccgtaattttttaactcttgatttagtttgaatgcgttcgctctatcataagtaattttttctactacataatgctcattcatcttaattatccaatttaaaacatcttggtagtcaatataaggcttatcttgcactgttaataagccatcttcttcccattctctatagggtattttttcgttagaatattcaactttgtgcttaggaatccatgaatgcgataaaactgcaactttaccattatctaacgcaaaagtagcacacgcggctgtaaagtcctctgtttctgataaatcataaccaatcgtgcacggtctgccttccagctcttctaaagaaacaatttcattatttttttggagtgttgggtaatcaataaaactcatctcgtcattattagcaaagatattaaaccttttggttataaaatctccacgttcagctggtgttctcttagctttttcccactcttctttcatctcatctaaatttatagagacacctaagtttggatttgcttttatccagttcgacgaatcattaatatcatcgtcatcatccaaagatgctaaataataaaaagttctttcgtcttctatgatttgatctaaggtgtctcttcccgcttctaccatatcaacaagtggaccatctaattgataccctgctgtcgtaatgtagatgagaagaggttgtaaccttgcagctcttgagttttttataactgaaatcaatttatagtctttaaattcatgaatttcatcaaaaatccccatgtgtgtattcaatccatctaacttatcgctatctgatgcttggggcataatttttgatatcgttgcgtcataatggatttcatctcttaatgttctgaaatttttatcaagctttgggctagcttttatcatcgccttagattcatcgaataatattctagcttgtttcattacgtttgctaaaagatggatttcagcgccgttttctccatcttgagaaacagcatagttagcaacaccagatatagtagttgttttaccattttttcgccccataaatatcaaagcttctttaaacctgcgcagttttgtttctttatgaacccaaccaaacaaactgccgataataaaatgttgccatggctgtaatacaagttgacgtttagatcctttggaaggtttacaaaacttttctataaatcgaataggacgatgcgctaattcttcatcaaatacccatttacctccattttctaaatatctaagatgcctatcacattcttttctaacatatttgcttgtttttattttcccttgagtgacttgctctgcataccatgttgttaatagttttggtgaaggttcatttaaaactttaatagtcaccaaatccaccttcttcttgaactatcttttttctttgtgctgctgttaaacccatagacttgagtaagttatttagtgtttgaactgtttttgtcagttctatgcttaatggattcttaacaatattgctcgcaccagccttgtttgtatgctctatcatcaaatcactatttttaagttcatctcttaaccgacaataaaattcatatgtttctatatacaagttaattaatatgtcatcagattttttgtaatcctctatatattcttttagctgtttttttgttaatttcatataaagaccccctttcataaaagtttatccgcgttgcaagcgaagggcccccgccggtacccggcgaaaaaacattttaagccaatgggcagggggctataaaattttatttaaatgtttttttatttaaatttttagaactctaattttcttaagattacttttgtcattatcatttgcatgaattttgttatgacagccataacaaactgacattagattatctaattctaaagctttgttaaaatcttcatcaacataaataatgtgatgcactatgtttgcatctgttacaatatcttcgcgtaaacacatttgacaaagatgattatctctatctaatgctatctcccttaacttcttccatgcttttgaatgatagaaccaatcgtattgatatgacttacgaccatgcttataaatgttattgtgcttggtcatctcttacacctctttgattgcataacaaaagacacaccgcatagcgatgtgcctcgtgtacttgtgtcgtataacttttagataactttatacatctttccgatactatcatattactacagatttgtaggccttttgcacaatctttgcacaatgttatttgatacctgcatgatacgctaccgctttaacaaagttctttcgtatagtagtaacagtattacgatgcatatggcattcatgtcctatctgttccatctttaacttcttttctttattccaatacttgagccttattactttcttatgatcttcaggcaactttaagtattcactctcaactgcttcgaccatttcttcaaggtttcgtaacatcttattagttaataatctagttgccattagttcagttgttctaactggttcgcctttttgtaatggtccatatacaatattggaatcttgttccttcgttggattaagtatttccaacctcaatctttttatttctttcttgttctcatttaaattatatatttctgattcaatatatttaaatgttcctggcttgatatcatttattgtgttccccatgttagacctccattacttatgcttagctattcttgctttaatagctttcattaattcttcttgcgttagttctttattttgtaaagctttatatactctttgatctattgtgttatcggtcatgatatgatgaataatagtcgtatgattttgtccttgtctgtataatctagcatttgcttgttggtataattccaaggaccatgtaagtccaaaccaaacaataatgtgcccaccttgttgtaagtttaatccatgtcctgcacttgctggatgtgctataagcaacttaatgtctccactgttccaacgttctttatagtttgaatcctctaatgtggttgcttccttaaacctttgaagtattctttctttatcgtgtttgaagttataaaacaatagtattggttggccttgagactcctctataatttcctctaacttatctaacttcttatcatgtataagtcttacatcttcctcatctgtataaactgcgccgttagatagttgaagtagtttctgacttaatgatgccccattttgagctacaactgttccttcttcttccgattctaaaatatagtttttttctaattcttcatatacttttctttctttttctgataagactactgtttgtttagtatcaactctgtcaggcatatccagataatctttcgctttcatgcttaaacatatatcttctatttgtttatatatcttttcttcagatccgtctcttagctcccacttaaaaatatgttcgctaacttgatgagttggtttaaagtacctttctcgataacgactgaatgaagactcaagtctttcacctctgtctatcaaataaacttgagcccataaatcctgtaaactatttggactaggtgttcctgttaatcctataaatctattaatgagtggtaatttctttttaatagatttaaacctttgactcttaggacttttaaatgtagacagttcatcaatcacaaccatgtcaaatggccattcttttttatattgatcacataaccatttagtattttctttattggttacatagatatcagcctctgtgtttaatgcatcatttctttctttaggtgttcctaaaactaaagacactttcagatgatttaaatggttccacttatcaacttcatcaacccatgtatctttagcaacttgtttaggtgctataactaacatttttttagtgtctaacaactgcaattcactaaatgctgtaagtgttgatactgttttccctagacccatatctaaaaacagaccgtatttctcattatctatcactttatctattgcatacttttgatagctatgtggtttgaagtcaatcgccaaatgttccacctaccattctgataaaagtatttacttgttctttattccataacacatatactttatgatctctattttcaaattgtctatgcacatatttttgtaaaggatgcaactttcctttttcttgcttcatttctacaaaatatgtttttccttctggcataataataattctatctggcacacctcttgttccaggtgcaacccattttaaacataaaccgtttagctttgttatctctttcactaaatatttttctaatgtcgattctttcatatattcaccttgtatacaaaatttatatttgtgttccgatgttgcatcaattcttgccaaacttttaaaaatagctgttagagggttacccctatacctctttactccctaacactactttttaaactttatagtgaatttgatgcaacattggaaacaaacagggttgaaccttacagcgagaagggaaagaggtgttgtatcatttgttgcatcaatgttgcatcactaaaaatgatgcaacacctacgattactttttacactcacatgttgcatcactcaaaaaatgatgcaacatctgatacaacactccaaaatgtatatttattcaatatttattatattaaatcttctaaactttcatctcttacataagctatctgtacaccataatcttttccaaatcgaattttcccacttttattaccatcatatacagaccaattgtctaattgtcttaagatgtttgaaatctttctaatttccatagatcctctactatctcccttatctttaccaaaacattcaacaaacacttcaagcgcacagaccttatttctttcaacgtaatctacatttcctgttggtaacatatcaacatcaccttgataaaatcgtcttcgttcaaagatagttaagtcatcccaattgctaggaattggtgtgttaagatattcatcaataatgcctgtatatggagattcctcagtatgtttgctttgtattgaacgcatttcttcttctagttcagggttgaggaataactcttctccttgttcataataatatttagcttctgcccaaatttggtcgatctcttctttggttagtttagaccagttcacttcaactctctctggatttacagtcattggccaaaaacgtcttccaccagtttcatctcttaagaaatcaactttattagttgtaccaatgaaaatacattgccttggaaaatcttcaatataatgtccataagcaacacgaaaccggtcaacttgtttagatatgaaatgcttaatagcttcaacttcagcttttcttgtagctgcaagttctgccatttccattagccaaacgccttgtaaggcctcataggcttctttacctgtaacagaaactaaactgtcagaaaaccatgcaccacctaatttttttagcaaagcagatttacctacaccttgaggaccataaagtgtaagcatatagtcaaatttacatccaggctccattactcgagcaattccagcagtcaatgcttttttggtagttgttctattcacttcagtatcttcaacacctaagtatttgataaataacttttcaagacgtttatgtccatcccacgatattttatttagataatcccttactggatgataagcattttgcattgctacgcttataatggcatcttttgttttacctgaatggtgtatgtcataaatcttttcgatataacttcttaaactgctatcatcaccgtcttgccattgacgtgtcttaaaattagtattccatggcactttccctaagcattcaatttgttttgtaaattcattaaatgctatttttccttttaaatttggatcattacgcaatataatttctatatttgggatactagctttgaaagtacctttcgaagtaatttctaacgtctcagaccatgcatcatcgctatttactatttcatcgaaatcctgcattgcatcagacattttgtcgttaattaattgctttttaacaacttcatcattttgcgctctttgctgcattgctttataactaggtagtcgattaaccggagtatctgttttagcgtcttcatcttgagcaccatataagtgtatgcgtactaaatcaaaactgttcacaagcataccgcttacgggatccgtattatgatgagaataggcaaacttgttattttcgtataacaccaatccacctgcagttgaaccttcatgataggtataacggttagtagaatgtttttcgtataagtcaggaataaaagttgatatagcttcttctatcgtataggctctacaaaatgcgccaacaattcccggtttttcttctgggtcaccttgcttatctgctaatcttttagtcttactctcttcctttgaagacgttggccattctaatgtgtcagtccaatcaacatattcatttaatattttatctggatctaacaaaggtaaatcttcataggtaaagaaaaattctgcatcattgctagttgaaggccaatacattaacctatgtggttgataagttgtatcatcgaagtaatccatgccaacgatatctgccactttacgtccaatagcctcatactcatccgcatttacattccgttttaaaggaatcactaaacgtaatcttggacttatctctctatgcttatgtgttgaatacaaacaatatgcaaaatcataaaacatagataatatgtcggtcatatcttgagcagcataatcgatatcaagtgttagcattgaacgattcatgacttgaccagcacgccgtttgccttcttttaaatatccaccgacaaatccgccaacatcttttatatcggcttgttcagacttagacattttattgtactcagttaaatcttctttagttctaactgtttgtgctagcttctgcataaagtcagaccaagccatattgtgattagtccaatgtgtagataaacgactagcagcataagaatatgagacatcacgatcatatttaattgtttctatttgagtgactttgtctaacatgttcggctcctttcattattttagatagagcagagaagccaacgcctctctttagcttttgaatctttttctaattcgttcaacttcattttcataatcttctataccttcaacaccattattttttactaactgcttgaaaagataagcattcatatactccaatgcttctatggttttcatcttatgagaaatgctacttaacaagatcaataaaaatatagataaaacaattgaaatgacaatccacatatttacaacacctccagtgctattgctaaacacattaatataattaattcaaaaatgataatagctattaccatgaaacttcagctctgattttttcaaagtcacttggcgcctctacatcatcattagccgtcatcataatatatacttgctcagttacatacttacctagctcatacatcgctagtaggaataataatctcaaaatttctttaaccaccactaaacaccccatgttaatttatcgataatttgtatagcttgttttaatgcgtctcttttttcttcgatatctctattatcgccatcttcatcagctgacattaactcactgtcatattcatataatagttctgatatttcattactagctactactaataagttttcatctaatgtctgagttaccgttttctttggcatctccatctctccttatcttaacttgtgcctcgtacttctcttttgcttcttctttactctctgcctcaacaactgtaaacttttgattgctcttagctcgagttatgtgcgtatgcttgcgtcctgttgaatctttgaatgttgtgactaagtattgtgtcacttctcatcactcctatttatttgatttcaaaatcaacttctattggaataacaacgattttataaccttcgtacaatcttttgagttcatcaaatatttggcgcaaaccaataacattcatatttttactctgtaaaataaatatctccttattccaaccacgatatataactttagtgcgttctctcacttccccaaaacctccttgactcgatctaatatgtctttacactccgctacttccgaagccttttgctccacgttctgaaacactctcaaattcctccacttgctttagttcaggtgtccatataggcacgataaccaattgagctagtttgtcgcctttatatatttcgtaataatcatttatagtaaaaggttttttcttagcattatttacaaaagaattttccatttctccttgtatatcaaaacactgttcgttagttgttaaatatacttgtgcatcattcttgatattaatccctaaattgccatgatatcccgcgtctatcttgcctgtttcaatcactaaatgcgttttactacttacaccactacggctagttaatagtccgacatagccctctggtatgctcacagctacatctgttttaatcactgccttttcttgtggctcgagtacgacagtttcagctgagaatatgtcataacctgcatccgtcttatgatttcgttctggcattctagcgttttctgataatagctttacttgtaggatgttagtcattttccttgtcctcctcatcaattccagccaattcatacataacgctctccatacttttatcttttaaatcttctgacacgaatacctttaaatcatggaattctgtaattattgttttttcgtcatggtcgatgtaaatttctagcgtaccatcagctaaattaaaaatagctttatcttcattttctttgtatcctttttcttttaatttcttcaaagattcattaattttcattttcctgttcctcctcatattcaagctctcttacttctctcaaaacctctgacgcccagtcttctggatactcaacccattgcgcattaatagcttcgcgaatttcatcaaacgcttgcgctttcttatacacgtcttcaatctcttttagcaatccctctgtgtcattgccgttatacgcactagcacttataacggattgttctatttgttcacggttatccatttgtgtcatcctccgtattcggataaaatttaataaacattttattaccatgcttatctatggcaattaactcttcgtattcgtcgtgtgatacatacttatcaatcacacaattttgtaacatttgcatcatttgcatatgcttttcagcattcatcatttccatctcctctaaaataaagttagttgcttctgctcctcgtattccaaaccatgttgctttatatatgtttcaagctcttccgctgtatcaaatgtctttttcacaccttgccaacctggtacgatatgtccgtgaaagtaataagtgccgtttactacatggatatgtgccactcgttcgttatcctgatacagatatctcttagatccaaagaattgatttaggtattctttacgcgcgctatctgtcatggtcatcactccttttaacaattaggcagaccaaacgacatgcattcgtcgtatagctcttcattacttatgcttgccttatagttttcaatcacattgctaacttctttatgactcattgctttaacttgttcgtctgtatatttttcgcagtcttctaattccagttgctcctgtaatgacatcacatattcaacttgtctttgggttgccatcgttaaccctcccacaagtcaaaagctctttggacgtaaaacttcgcctttgctaaatcctcatgaccattctttaacggtgctctagacaagtatttgattgcattacctattgcgaatgctagttgaggtggatactgtgccgtaacctgttcgataaaatctataatttcaatgtcgccgtatgtgtagtgcgctggttgcttaacattgtcttgcgcttcgttcatatctacttttctgttactgattacgctcattatgcttcactccatttcttgaacatttggttataagtgacatcgaaccagtacggatcacgtgaatgtttttgtggcgttccatcataaagccatggtcttaatcttctctttctttcctgttcatattccgctctcacatttcgttggtatcggttcaaaatcgctttttttctgattttttctctccctttttcttcatcttttatttgactctgcatatattcaacttcatctttagattttgagtcttttcttccacacaataattcatcgccgcgcattttatgtttgtatctatatctaagaagttctggagatatgtgatatttttctgaaacttctctcaatgtcattagttttcctttgatacgcactcttataacttttcttctagccatcattccacctctaaatctaaaaccttgatatttataacgttatattttaatagttcacctggattattaaataaatagtccgccaaattttctttttctttatcaatctgattgtaattaacactttcgacttctgtaggaattctaatgtcaacagaagcattgatataagcttgatgttgcatgcaatcacactcctaatccttcatataaaacggagaagtaaacccgtcactattcaaattcaatccttttgcccaatcaacaggcttattcatgatagtttcgatttccttaagtccatttgaacctctaggtatttctacaattacttcatcatggacatggccaactattttaaaacctaatgcttcaagccttgctatagaaatcgcaagtaaatcccttgcagttgcttgaacaatattctcgactaacttcccaccatacgtttttaactttgaccatttacggttaagatctaaccccataaattcaacaacttgactaccccaactattttcaccaactaaagcttttggataagctaaagctcttccactaggcagttcaatcattagaaaaccttttttcatataaaatctaagtccatgtgtatgatgcgtctttcgggattttacagtattaattgcagcctcttggcaagccttccaaaaattaactatgttaggatttgcgttacgccaactatcaactaaaccttgtaactcgttttcttcaatgcccatttccaatgcacccattgcttttaaagctccagcgccaccttgatagcctaaagctaattcggacacttttcctttttgtctgagagggtcgcctttagttatgctttctaccggtacattaaacatttgagaagccgatgcttcatatatctttccgtgtgtgttgaatacatctaaacgccattgttcttttgcataccatgctatgactcttgcctctattgcagaaaaatcacttactgctagttcattaccttcttcagcagtaaatgtcgtcctaactaattgacttaataagtcttgaggatgaacattgagtaataaatctaaatcatcaaaacgttgttctttaataagatctcttgctatttctaattcagtatctgaaatataatgctttgttaaattctgaagttgtacacctctacctgcccatcttccagtaccggcaccgtaaaattgaaacagacctcttacccgttcatcactgcacatcatgtcatgcattttgttgtattttttcacactggttttagacatttgcaatctaatttctagcatttttttagcttttcctgttgcttcttttaagtactcctgaaccgttttcttttgtaaattaggtatatctaatccttgttcatcttttaaccaagccaataactgtgtaggactattaggattttctaaacctgttatatgtttagcttgtttaagcaattcttctttactctgcttatcgagcacattagctcctaacatcaatgatttagaaagcttaatacctctgtcgtttatatgttggtcaaaaacccaatatgtttgttcaattgcagttactggaaagtctttaattttattagcaatcgccatttctacttctacatctcgaatacagtaatctataaattgttgccatttttcaagatcatgttcaggtaggtttcttgttcttcctccattaacttttgttggtttacaaggtatagagaaataacgaattaaatttttacctgctttatctttttggctttgtagtcttaaaacttctccaactttatcaagcgaagcaggtaagccaatacgcattgaattaaccattgtgcaaatccattcttcaggtggcatctgtttattaaaatgtttagcaagacaagttctttcgaaattagcattgaatgcatacttttttacagcagggtcaaatagagcaattttaaacgtctcataatcagcgtggaaaggctcattatctactttagtcatgtcaatcgcactaatcgctccaccatctatcgaataagctataattaaaatttcgaaatcttcagcttctgtgtatttataggcaccacatttcgaaatatcgttactgctgtatgtttcaatatctatattcataaatttcaaattcttgacacctcaatttctttaaaattaaagtggggctaaaaaccccacctattgacttataagaaatcctcatcatcagtgtctaattcatcaaaatcatcttctgctgcacttgcaccgccaagaggttcgcctttttctacaagttgaatgttgttcaatccaactgcgatacccttattaccatttgtgttgaatggaaataaattgattgaagctctaatatagtcaccacttacaatagttccagaatccgttaatctaattttgttttggtcaataataccaggtgcttgtttgcttgatgcgttaataaaataagcgtcttgataattcacatcatcttctctttcagtatctccatcacgtaatggaagtttcagatttgcaggaactttgcctccaaacttactaacttttccttcttctttagcagcttctatagcttgttcaatggcttttatcgtacttgtatctgatttaggaatgattaaactgattgaatactttgcttcttgcccttcttgcatactgtgaggttcaaaaatatgtgcatatgatgctcttacttttcctgtaatcactttagttttatttaatacttttgctttcatgtttatataccgtcctttttaatttttatagtttgtcaaaatcatcttcagcagattgctttatagctggtcgtttatcagactcggtagcaagtgttaatttaccttgtggcttttctataaagccttctgcaattttagaaaatgcttttttgccgattaatttttctaaattcgtaatgctaagtaacttggtttctgtaatatcttcaggtttataacccgcttcaactaacttttcaagcgttgcatttgtatcagttatcattcttcgcgagcgaccttctacaagcttccaaccaggatagtttttatcattttctttcgcttgatctagtgcatatttttctacttcatcagcccattttttgatgtcaggcagtttatataaaagttctgcaatctcttcatcactcaacaaatgtggtggcttttgaggcacattttgcatgtattctgcacgtgttctacatgaatgctttatcttacagaatctacaatgactacctgctttaaactcaccttcaccgttataagcaagtctggctaatggtttaacaaaatcggttccccattgaagtaatcttgatattggtaactcttcagtagaaaagttatctattcgtggttgtatgatagtcatgcgaactgtatgaatgtcatacattaaactaagcagttcatatgcgcccaagccatataatctaagttgaggattatctatagctgaaacttcaatgcctttaccgtatttaaggtcaataatttcaagtacaccacctgaaaatataatgacatcaccagtaccaaaagattcagggacgtatttacctaaatccaattttgtttcaaataaagctattacatcgtcatctctactcaaagcctcgttatacttttcttctacattagctacgtactcttcaacatattcgcgcaactcttcactgtaatattgatttcgcttataattttgaaaagctttattaaactcaaactgtgttaggccttcatatttaagactgaaatataactcacttaactcatgagcgaatgtacctttttcagcaaaaactgaacttttatctgcaataccttcacttgccttaatactcggtggacagtttagccattgttttgctccacttgcactaagctttgcatgagctctatttgagtgatctagcttcatgcattaattctcgcttccatgaaatcaacaattttttcataatgttcttctttgatagtagatagcttatccgcaccaagttcgttaagtttatttctaaattctttcttatcagaagtatctgcttttttaaggaactcttttcctactgataaaatataatctttagttaaatcagtagacgtttccttaacttcttcaattgtttccagttgagctgtttcttcttttggcattggtgcttctttaactttctcttgtacgattgatgaatctacagttgatagttcagtatttaacacacgtaaattcttatttaatagttttaattcttcaaaaatatcttctaatactgccattgattaactcctccttaaaattggttagctagacgaatcattaacttgatacgttcttctatttctctagggtcatcactttgttcgtttaatcttgccaataactcgaattgttcttctaatatctctttcttacgttctacaacagttaaatgtaactgcggttcaacaacacgccagataccccaactttccaattcaatctttccttttttcttaagtcttgaaagtgtggattttgcatgtgttttagatatcccaaaaacttcaacaacatcatcagaattgaaattgtcatatgttgcaaaatgtgatagtattttttgttgtaaggtcatattaataactccttatataattatttaagacaattgctcatcttgcactgttacttgctccaacaagtagcagttttttttattctccataaaagtattccttataaaatatgaatgttgcgatacttgcgaatcccgcaattgaccatgctgtagtgaagtatagaaacggcatgagtacaatcgctaagaccgtgaagcacaacactgctaataggtagcttttatatgtgtcgctcatttgataatcctcctaataccattttttatgctttctgatcaaatactcttctaatttagaaatattaatcaatgttcccgttgctgaataatcaatgtataaattttctacacctaaattatcttcacggtaatatttcaaccagttgtatactgtacttctacatactccaaacaattgatggatttgtgtaggtgttgcgtataactttttcacaaatttttcttcgcctcgatatgtgttttctggtgttggtggtattatgatttttggcatctctatcactcctttagataaatgttaaagtttgttattattcgctctgtattgaagttctctatctaatgcatagaagactttgtttatttctaagtagctgtaataaccttttttaatactttctaatatttcctttcttagtcgacgttcattttctgttaaagattctactggcgcgtgatctcttctgaaaacccttggtattctgatgtctaacccttctgattttttgttcatttgttgttccacctttcgtgtataatgttgttatcaacctaaggaggtgataacatgcccttgatatctgatgaatttgatacacttactaaagaccaacaatatatcttgtccgtactctacaaagattatttagaatgtgtaaagttaggttcggttaaattaacctgcaataattttggaagtgctaaagatatacatacaaagtattttcaaaaactacatttcgaagatgtaaaatacgatttaaataaacttaaaaactctgggttcctaaacggcgtgtatgctagtaacactatttatcatgtaacaatttcagacaagactgttgtttactttgaaaatgagtttaaaaacaatttaaaaagtatcattgatagcatttctaaaattgcttcaataattcctggtctctagttgggtttataacttcccaatcatttgccatgaggtcatcggctgaaggttgccaatatctgataaggtttgtcccatcgctatttgaaatgatgcattgtaaaaaactatcatttgttggtaatatcttagttcgatgactttctttccaatctttccgtgtcatagagacaagattttttgtagctatcttagttgcttcttgaatgttcatttgttattcctccttttaagatgtttgtttttgttttgttgacattttggaaactctgtaagtaaaaaaaataccgcacttatcttgtggtaattctaacacttcaattacttttgctaaatcgtcaacattaattctaatatgtccgttttctttttttgaataagttcctggtgtcattcctaatttttttgccatatcagaaatcgaaatgcctttagcaatgcgctcagctttcattcttttgacattgaactcatacatttgctcacctccgttttttgaagttaactcaatattaaacttaagtttcctaattgtcaacaaaaatctcgaaaaatattttttattcttttaaaatgctagttgtttcctatatggaaaagtgttattatactgttataaataaaacggaggtaaatttgaaatgagaacttcagcggaaataggtaaattaatcaaacaactacgaaaagaaaataatgtgaatttaactgattttgcaactaagataggtgtcaataaatctaccttatcccgatacgaaaacggtagcagaaaaatacctatggaggatatagctgaaattgccaatgcattgaaagttaccccagaatatttactattaaaaaatagacaaccagaaaacgaagtacaacatcgtgcagctcaccttgaaggagaattgacagatgatgaatggcaaagagttttagattatgcagattatataagaagtaaacgtaagtaaaggatgtatcagatgggattatatgaagaaactttaatacaacatgattatattgaaataagagaggctgatgtgcttccagataatttggatggggtatggttaggagatttaattttaataaagcgtggcttatcagatagagaaaaggcaggaattctctttgaagaattagcacataataaacttacatacggtgatatagccgattactcgaaattcaacaatcgcaagttcgaaaattacgcaaggcgacacggctttatctcagcagtcccgttacgcgaaattgtggaagcttacaattatggtgtacgtaacttgtatgagttgtctgagtatctgcaattgagtgaagaatacatattagaagcaatagaacaatataaaaagatatatggtattgggactcactacggcgaatactcaattacatttgagccattgagagtttatcgatacaaagagatataaaaaaggagaaatgtatatgaggaaaataattggattattactagtaagtactttagctttaacagcttgtggtgaaaaagaaaaaccaaaaaaagaagaaaataaaaagtctcatacacaaaaacataaagatagcgaaccaaaaaagcaacaagaaaaaatgaaaaaagttgaagataaaaatccacctaataatagcatacaaaataattcaaacaatcaaaaccaatcacaaaacaatcaacttaataataattcagatccatctaataatactcctgcaaatataaataaaaacgattcacaaaatactaatttaaatgatgagtatgtcgtttcgcctggctggactaaagatgaacaggctaaagcttttgaagagtacaaaaaaggaaaagaagacgaagcaagagctggtgctagcgcagtaccaggagccaatattaactaataaaacaatataagaaagaagagctaatatggaaacaaataaaacaatcgatttaatgaattatgtggaatttccaaaaagatacacagaggcaaaaggcaaattagttgcacaaccaataactactataaatagcgcaagaagagttgaaaatgaagatatgactgtttgctacattttagatcaggatgatgatgtaatggactttatctttgacagagatataattactgtttactgtcctgaaaacggaactgcgactgatgaatatttttgtgaaattatatttaactcagatgacacatttaccctaaagcgattatctaattacgttaccattaaagatagaagctacccaatgtcaaaaataaatgacgtaaacattacgggcaaagtcgtcagattatttagagattttaaataaacttggctttaattacgattaaaagtacctatatagcgtaacgagaaaaaggattaaaaaaaattcaaaaacgcctacaagtgtagacgttgaatggtggtgagaattttatggcggataaaaacaaaaaacaagaagctactcgtagtaacccaataaacaaaagttttgaaaagccgggtgccagcgaaaacttaaaaagcactttatcagaaaaagctaagaaaaaagattaatattcattcattaaatataaatccaatttaatttgttgtttaaggtctacaagtgtatgtttaatatacaattcatcgtttgacggtaaatcagatactttgaaatcttgtcgctcaacctctagtaaatcgaaatcgctaccagctgaattataggttttaagttcaccctcttcaatgattctgttttcaaagtctttaataactataaatactggtttaccgttgttattaaacaacttgtctcttttgtctaataagcttatacaatccaaattcataaactttcttgtttcattaattaaccagataatgaatttaacaattaaaggattaaatacaagcactgttaaaacaaaaataattagaaaccaaatatttgcttttagacctgtaagcaactgaagtaaactcaaattttttaaatcaacattattaaaaattataaaagtataaaaccatatcaaacatgtttcaatagaaaaaatcaataatacaggagtattgataatcttgtttttttcactaactaaacctatcattgttagatatttatatggtatgtaacctaaaactcctgtaagaagaagcgcccctagaaattgagtcatcttatcacctactttttattttattataacatatttagtacctagtactaaattttgggtagcccccctacccttattattttttacaaatttacagaacgtacgttctctcaggaggtataaacatgtggattgaaaaatttaaaaacaaaaataacgaaactaaatacagatattacgagaagtacaaagatccatacacagataaatggaagcgcgtaagtgttgtgttgaacaagaatacaaaacaatctcaaaaagaagcaatgtttcgtttagaagaaaaaataaaagaaaaactgaacaacaagtcgtcaagcgaattaaaaactttgacttttcacgcgctattagatgaatggcttgaatatcatataaaaacatcaggttcaaagttgactactcttaataatataaaaataagaattaaaaacattaaacgatactgctctgagaacttgcttttaaacaaacttgatacaaaatatatgcagatatttattaataaattatcagatatctattctcaaaatcaagtaacccgtcaactcggagatatgaaaggagctattaaatatgcagttaaattttacaattatccaaatgaatatttgttaactaatgtcaaaattcctaaaagaagaaaaacaatagaggatatcgaaaaagatgaatctaaaatgtacaactatttagaaatgaaccaagtcctacagatacgtgatcatatactaaatgataataagttacacaagcgaaatcgcattttaattgccagcatcttagaagtacaggctttaactggtatgcgcataggagaactacaagcactgcaggaaaaagataatagatttattaaacaaaactatcaatataacaggtacaattcaccgcattaaatacgaggaaggattcggatacaaagacactacaaagactataagttcaaaaagaagtatcagcatcaattctagaaccgtagaaatttttaaaaagataatactggaaaacaaaatgttgaaaagatggaattcgagctatgttgacagagggttcatattcacaacaaaaaaagggaatcctttatgtaataatcaaatcgccggtgtgcttaagaaaactacaaaagctttaaatatgaataagaaagttaccacgcacacatttagacatacacacataactttattagtagaaatgaatgtttctttaaaagcaattatgaaaagggtaggacatgtagatgaaaaaacaaccattcgcatatatactcatgtaactgaaaaaatggatagagaactaactcaaaaactcgaaaacattccaagttagcttaaatctgccctttttttgcccttatattttttataagctttataaaacgcttgagaacactggcgttaaagcttttcttgaaataaacatatcatcataatgagatggttcaaaaatctgattaacaattaacggtttcatatttctaactatatcatctaagtgattttctaaaatcggcgaagctatttttaaattatttaaaaattcgtctaagtttttaagtttactttttaaaacttcaagcattttatcaatttcgtcaacatttattcccattgcctttatctttattttcattcctgatttatatattaaactgcttatttcataaatatgtctcacagctgtttctaccgaatgtataacttcaagaatgtagtttaatactggttcaaaataattattgtaagtttcttgaacataatcactaattttgttaactgcattatcaatatggttttttaaaattgtcatttttctagttaaataattagaagattgtacttgacccgaaatcatatgttcaccactataattaatagataagtttccatccattaccgttgcatcttgatgagacattatatttttaatatcggttatctgctctccatatacatcattttgctttttcacaaaatttatattattattcacaacatttaaatgcttcatcatttcctctgtcacgccatcttcaaaatcatgatctaaatttttaaacatttctttaattacgttatcaagtgaatcatgtaaactttctatgccacgttgtaattttttatctaaatcttcaagaatttcttcaatagtatttaattcaagaataaggactccagctgctggagctattaagattattacgacaagattttttttgacatcatcaattgcgctaaatacatcctgtttaaaagaagttaattccctactcattccttcaaggatatcaacttcgacaatctttttaaaatcttgtttaagtttatgttttctttctccaaaattagaattttcaacctgtgaaatattatagctctcattcaaataatttacacaatcggttaacatattacttgtttcaccagttaccaaattacttaatgcactaagattttctagatttaattttataggagtccctttacccgttctcgctattgaatctcctgtccacacattaattggaattctatcatccatatttatatcgatttcaatagtttttttgacttttttaccatttttaatcatagtatctttaactgatttaattttataaactgctaaatccgtataagtattatatcttggatgtaattttcttttataacctaaatgactatttactaatccatccatcgttggcacaccagtttctaaattcactcgttttcctagtgtcggagtggcaaatggatcctgtagccaagataaaatatcaaacttgctatgataattaatcatatttttaaaattttgagatttgaaattttcccatattgactttggtaacatggcagggtttgtcgaaactatatttttatccggattaatcaaaccttgatggttagcacttgctcccccttgagaattgcctccatcagacttaatagttttgtttttatacgtagacggattttgcttatatttccttaaaaaatcagagcttttaagtgtatctgcatcttttagtttctgttcatacgatttaatataagcattattttgttctaataaagaagttgacttatttttatcattcattaactttatattttcaatccaatcatcagcaaccttcccacgaaaaggattgttgcttccgatactcttattattatttgtaccttggaagataatagcttgttgtcctgttaattcattattgctatttaccaattcaaaaacttttgcatctgtaccaccaaaacttttagaattaggattatctgaataatcttcaattagtctatatttattattatttactctaattacatatcttttgtccaaatcttgatatgcccagtatccacttaattctgctaaatctctatcattaatttttttcatgattaaatactcctacttctattgaatctttcttactgtaactaggtcttgctgaatttatatatttatcagtaatttgaagagaaacattcaaatcatgaggaatattctttttcttttttagtacttcagaaaaatcaatcatctcgtctattgtattatctttagtgtaattgtctttagtgctaaataaagttgtaacaacatatggacgagatttatctttaagttgtttttttgagtttttcataccgtccctaaaagtcttatcatcctctttgattaagggttgaaaatactttttatattcatctaaagtatatggaattgcagtcaaataataatattcatttctaaaaccactattctgcgttttcataattgcattttctgtataaccagtatatttatatttacttttatattctttcaaaacttctgttaaactatccaactcttgcttatgtgctcgatattcaaatccactgagtactgtaccaactaaagtactcatatcatcgcccttatcctcacttcttaatgagctatcactgtcaataattgatttatcaaatggaatactcgcattaaatacgatatcgtggtcatcgcaatgcacataaacttctacaccgtcgccactacctacaacattggtagctttaacttttagaccgaagttatccataaaaaattgttcgcctcgtttggcaattttatctttatgcttcttcgcaaattcaatcgcatctttttctgcaggtggttggaagccttgacctacatattttgaagcttccatttcttctggtacagattttgtttctgtttttgtgtctttttttgattcattttccatcgtggaacatccccctaaaattaatgtcgtagctaaaactgatccaatgaattttttcatatgacacctcgaataatttaattattacaatatatctatattttaccctatttttataatcaaataaataactttatcaaactttatatttttgtataaattagtaatatatttaatagttgttattcacaaaaatcctaaatcgtaatccacatacaaaattccccacatcaatcaaaaaacgcatgctataaattagagtctctaatcaataacatgcgttcttaaataactatattcagttttattctggttttggtagtttaataataaatgttgtgccttttcctaattcgcttttaacatctatggaaccaccatgctcttcgataatcattttacaaatgaacaaacctaaaccggtaccttgtttacctcgcgttctcgctgcatcaactttataaaaacgatcaaatacttgttgtaaatgttctggtgcaatgcctgtgcctgtatctttaatgtataaaatatcttcgctttcattttcatcacaagtaattgcaatttcatctccaggtttcgtataacgtgatgcattatcaattaagttcgttagtacttggtccatgcgatccatatcataactccaaacacgcttcttacaataattaaaagtcatatttagacctaaatcatcagcttgttggcgatacttaattttcatcttatctagtaacgctgcaataggctgaacttctttatttacggataacccttcagcatccatgcgtgcgacatttaacaattcattaactaaacgatttaaacgtttcgattcatcaaggacaatggcaagcgattcttttatttcatccggttctgtaacaataccatctacaattgattcagtataaccttgaagtaatgatatcggtgtacgtaattcatgtgatacattagcaatgaaatctttcttcatttgatctagattgtgctcattagtcatatcacgaactgtcacaacaacaccacttttacctccctgttcaatcttgtcgatatagcttgtggtcacaacaaagaatcgtgcattcatttctaaatcacgcatttccgtttgttttgatttaaaagtatcttcaatttgtcttaataagaaagctttagcatcttcatcaatattgtccataatatcattcgccatcttattagataagataatttgtcgactctcattaatacctaggacaccttctaccatagagttaattaagctgtctctaatatttttagatgtggataatgcgtcgacatgctcttcgatttctgtactcatctgattaaatgcctgcgataattgaccaatttcatctttcgttgtgacagaaggtttataagagtaatccccttcagatacacgtgtagcttggtctcttaaacgtcttaaaggttttgtaattcttgatgataagaaaaacgcaaagactgttgtaattgttaagaaaataacagccgtaattatagtgataatcgtaatagcattatttgtatcttcgattgatttcaagtctttatatataaagactccactatatttgctatgactattcttctgtgcttttgttggatagcctaacaaaatatatgtttgagatgagcccttttctttaatcgttacatttcgagtaacagatttacctttatcaaacacatcgtcaaaatggtcgttgttgactacttcattcaacatttgctttttaatattagaaagtgaagccgttgattgacgatgtttattatttataatcatcaacccaccaggattttcaattaatgtttgactatattttattgcttcttctttattatgtgattgttcgaccagtgaacttatacgtctagcatcttctcttatggcattttcggtttcttgtgtgaaatagtattgcataaaggtaattaaagcaatacttaataaaattaaaactgtcgtcactattaaaataatagttaaccacagtttaattacgacactatttagccggctcatcattagatttaacctcaaatttatacccaacgccccagactgtttgaatcatatgcgcagcttcactagacacacgatttaacttttctctaagtcgtttaacatgagtatcaactgttcttaaatcaccatagaattcataatgccaaacttcttttaataattgttcacggtcaaatactttatttggtgttttagctaaatatattaataattcgtactctttaggagtcaaattaacttcttgattatcagcaagtacgcgatgtgcatcattatctatttctaaatgtttaaattcaatcacatcacgtgcgtgaggttcgctttgttctacagttgtagattgcgttcttcttagaagtgctttaactcttaagactacttctcttggtgaaaatggtttgacgatataatcatctgcaccagattcaaaaccttcaacacggtttgtttcttcacctttagcagtcaacataataatcggtgtttgtttatgttcacgcaatttagttgccacctggataccatccatttcaggcaacattaaatctagtagtatgcaagcataattattctccattgcaagttcataagcctcttggccattacttgcttcatggatttcaaaagattctctttctaaatacattttaagtaatcttctgattctatcctcatcatctacgataagtatttcgttcgacatacaggtcatacctcccacacatgcttttctttacaaaagtattatatcacaggaaagcgcatacagttattaaaaacctaaaattttgtgaaaaattctcaaactttgtgataaatacatattttatttaattatttcccatgttctgctaaatgacgcatcacttttacttcatgaggcgtcaatacacgtccttcaccagcattcaaaccgacaacatttaaaggcccatattcaatacgagacagtttcgtcacttgatgaccaaaatgttcgaacattcttctgacttggcgattacgaccttctgtaattgtaatttcaaccaatgttgtgtttttatctttatcttgtttcttaactttcacttcagccggttgcgtcataacatcttctaattcaatacctttttctagcgctttcacttcttctctcattaaataaccttttaatttcgcaacatattttttcttaatttgatatcttggatgtgtcattaaattagtaaattcaccatcatttgtgagtaataacaatccagaagtatcatagtctaaacgaccaacaggataaatacgtgcttctatatctttaaagtaatctgtaaccactgtacgtcctctatcatcagatacacttgttatcacttgagttggtttatggaataaaatgtaaattttgtcttctagttctattttaataccttcaacttcaatcgtatctgatggcttcacttttgttcctaattcagtgacagtcgtaccattcactttcacttttccttcagaaattaaagtttctgccttacgtcttgaagtataaccgctattagctatacgtttttgtaatcgttctaattctttagtcattattttctcctttttgattgactagattactgaaaaaagcatccatttcttcatcgtcttcttcagttgtcggcaaatcttctatattggaaataccaaatacatttaaaaataaatcagtagtaattaactgttggctacgctgttcattaaccactttagcctcaactagtcctttggcaatcaatgtcttaactgcaccatctgaattgatactacgaattaattcaatatcacttcttgataatggctggttataagcaataattgatagtacttccattgctgcttgtgataatttcatttgtgacttttgttcaattaattgttcaatatacgttgccgcttcttttttagtcgttaaaacatacgtcgttccaaatcgttgtatcattaatccatgtgatgaataattttcaattaattcaacgagttggtctttcgacatatctaatatttctaatagttgtttttcatctaaaccttcatcgccagctgtaaataaaagcgactctaatataccatgattatccaaaatggtagttcactcctctaataatgttaatatcttcaaaattacgttgttgctcaatattaattattcctgcttttgacatctctaaaatagctaaaaagtgagtgactacttgttcaattggctcagaaaacgtaaacagactaaagaagttaaaatgatctttatctttcaatctcgatgtcacttgttctgtagcttgttgaatggtaaatgtctcttttcggatttcaacagatttaggtgtatttaactcaactctatttttaactctttgataagctacaattaattcagttaaatcaatcgtatgatttggatcccaagattcatctgtttccaaatgagataaatctgtcggtctttttgtaaaataaaaatctctttcttctttcatgtcatttaaaatagcagtatattctttataattttgatattctattaaacgcccaactaaatcttcccgtgggtcatcatcaacatccatatctgatgttgattgtggtaatagcatcttacttttaatcattaagagttctgacgctaatactaggtattcacttgcaatattaatttcaagctgtttcattgcatgaacgtactgcatatactgctctgttaatgcttgcataggaatatcataaatatctatttcaaatttttggataagatgcaacaataaatctaatggtccattgaaagcatctaatttaacttcatacataatatctacctcgtattgcgtcatatgtgcataattctctaaaatattatagcatgaaaataacttacttttaaattggggtgataacaaaatgcaacaggcactgataaatttctattatcaatttcatactaagcaacattatttcctatgtcatgacattttagaagatgcatggaaagctgaaaataactacagtaagcaagatgcagttgttagtttaatcttgtttgcaactgcttgttaccattatcgccgcaataatttaaaaggcgcctataagtcttttaataaatctaaagaaataatacaaaatgctaaagacagagatacgttataccttaatttaaatgattatcagttgttaattgagcaacagattgcaaaattgaatgcagcaaagcctttttcatctgttatattaccaataactccagtctttgaacgcatcatcaaggccaactatccagactatgattataatcaggaaacagcaacagatccttttattgtagaccatcacatgcgccgtgatcgttcagaagtgattgcagcaaaagaagaagcgattcaattaagaaaacatagaagtaattaatcaaccaatttaaaaaagccacaatagcacagacatttttagtcatgtgtattgtgacttttgagttatggttcactttatgctctaggatgaaattggttatacatttttctaatttgagatttcgaaacatgtgtatagagttgggtagtagatatgtcagagtgacctaacatctcttgcactgctcttaaatctgcgccattttccaataaatgtgtcgcaaaagagtggcgtaacgtatgtggcgttaacgtctttttaatgtttgcctttacaccattttgtttaatcattttccatattgcttgtcgcgataaaggtttaccatgcatatttaaaaataagacttcggtaatagtcttttttaaaagttgcggtctaatcgtttcaatataagtagttaagtactcaatgactgcgtcgcctaatggtacaattctttctttatcgcctttaccaaatacgcgtacaaatcccattattaagttcacgttctctaactctaaatgtatcaattcagatacacgcattcccgttgcgtacagaagttctaacatcgtacgatcacgataaccattaattttatttagatccggcgtttctaataaagccaacacttcgtcaacatttaaaacgtcaggcaattttttgtcatattttggtgaatctaataataccgttggatctttcgccgcatatttttctcttatagcaaattgatgaaaactacggattgttgaaataaatcgcgcaatagatttagcagattgcccttggtctattaaatgccccaaacactcttgaattaattgtcgatctataaaatcaatatgcgagatatgatgttcagtcatataatcttgatactttttcaaatcacgtctataagcaccaattgtgttagaacttagtcctttttcaatttgtataaaacgcaaatattcttcaataattgtttccataaccacacctctaaaaaaagcgaaggttaatttaacctacgcaatttactatcctttacctttagcttggcacgtttcacacacaccatggaaagttaaacgatgatctaaaattttaaaattgaactcattttcaactcgattttcaacttctggtaacaaatcttcatcgatttcatctacacgaccacattccatacatactaaatgatggtggaaatgttttgcgccttcttttcttaaatcaaaacgagcgacgccatcaccaaagttaattttgtcgacaacttttagttcagctaacaactctaacgttctgtatactgtcgccaagccaatttcaggcgctttatcttttactttcagatatacgtcttcagcacttagatgatctttttcattttcaattagaactctaacagtagcttcgcgttgtggcgttagcttatatgatgattgttgtaattgttgcttaacgcgatttaatcgttcttccaacgatgtccactcccctactaataattaaaatcattacaaattatttcaaacttcacaattaaaactaacagttttctcaataaaatgcaagcttttctcatttgttatttagaatgattataatttaataataggtgttgcaatgcaatgatagtcttcgcatcttctatttctttattcattagcatcgatttaacattctcaatcggaactttaatgacttcgacaaattcatcttcatctaagtgaactgtaccttcttctaaattatccgtaaaatatattgataattgttcatcgcaaaaacctggtgaaccatacatatctacaacatgtgttaactctttggcaatatatcctgtttcttcttctaattcacgctttgccgcttcgactctatcttcatcatcttctaatttaccagctggaatttctagcaatggtttttctactggtttacgatactgtttcactaatacgacttcttttttaggtgtcactgcacaaacagcaactgcaccattatgataaactaattctcttgttgacgtttcaccgtttggtaatgtcactgtatgaatttctacatctacaattttgccattataaataactgttcgatcaattgttttttcatttaaatccattataatcacgttcctttaaattcatattatatattgatacactatgcttgttagctaaagtgtatcgaaaggagaacagacatgcaaaaaaatatattaaaaagtggtatttcattatctgaattaggtctaggttgcatgagtttaggtacagatttaaaaaaagccgaacaaattatagattgtgctgttgaaaatggtatcacttattttgatacagcagatatgtacgataaaggtataaatgaatcagttgttggtaaggcacttcttaaatatcaacaacgcgatgatattgtcattggtacaaaagtaggcaatcgtttaacaaaagatggcagtacaaaatgggatccgagtaaatcctatattaaagaggcagttaaaggttcactaaagcgtttaggtatcgatcatatcgatttatatcaacttcatggcggaaccattgatgacccattagacgaaacaataagcgcatttgatgaattgaaacaagaaggaattatacgtgcttacggtatttcttctattcgcccaaatgtaattgattattatttaaaacatagtcaaatcgaaacgataatgtctcaattcaatttgattgataatcgtccagaatcattattagatgcaattcacaacaatgatgttaaagtattggcaagaggacctgtgtctaaaggattattaacttcaaacagtgttaatgtgctcgacaataaatttaaagatggtatttttgattattctcatgatgaattgggtgaaacaatagcctctattaaagaaattgaaagtaatttatctgcattgacatttagttatttaacatcacatgacgtgcttggttccatcattgtaggtgcaagtagcgtcgaccaattaaaagaaaatattgaaaactatcatactaaagttagtttagatcagattaaaacagcaagagctcgtgtaaaggatttggaatataccaatcatttagtgtagaagtcattttcagtaataaaaacagcagcatgaggcgtttcattataaaaatgccttactgctgttgtttatgtacaattcgctataatttatgattatgattactcacttatgatagaaattaaagcgttgtcctcacgcatcagtatttagtaatttcgccttgcggcattgccttaagcaaacttctgccacttcatctcttaataattttattaaaacatctttctatatttcacttcgcatgttgattcatcattattagttattatttgtacacccagcacatttccttgcaacacaagtagtttgaatttttcacaagtataatataatgtaccgtctgaaatttggtctacagaaatatcgcctaaaatatccagcactgtaaattcttcaaatactgatagttgttccgcatatcgtacacaaagtcttaccacactctccgattgacagttcattgccatcccacctatttatgctttatttttaaataatttagggaaacatcgttcaaaaaatctaggcgcaatttgatacattttcaacgcatgatgcatccatttaggccgattaatttccaattgttttgttttaatgccataaatgatatcttctgcaagctgattagcatcaagcataatttcccccatctttttagcatacttcattgatgggtcggctttttgatgaaaaggtgtatcaatcgggccaacattaactgtcatgatatgtaagtttggtgactctagtcttaaagcattcattaatgcataaaaccctgctttcgatgccccataatgtgcagcatttgcttgtgtggaaaatgcagcttgacttgaaatacctacaatatgtgcgttagatgttaaatatggtctcaacacagtatataaaacattaaaactaattaaattaagctgatacgtttcaatcatttctgaaaaactatggtctgaaatagatttgaaataacctaaacctgcactataaatgaatccatcgaatgatgtattgtcttcaaattgcagtgcctgtatcgacttcaaatcatttaagtcacaaggaataacatttatagttttccccaattcttgttcaaagattctagttgctttatcaacatcacgcaccaacaacgttacatgcactttattttctagtaactttcggacaatcgataaacctaaaccactcgtaccaccagtcactataaaatgttgtcctttcatcaattaaccttccttttcaattatatagaatgcaatttatcgtctctgtataattgagacaagttgattatctttcctaatatatatacaataataagaaaatataacatacaaatcaaaaactaaagggatgtgacgttaatgaaactcgtattttatggagctggtaatatggcacaagctatatttacaggaattattaactcaagcaacttagatgccaatgatatatatttaacaaataaatctaatgaacaagctttaaaagcattcgctgaaaaactaggtgttaactatagttatgatgatgcgacattattaaaagatgcagattatgtatttttaggtaccaaaccacatgactttgatgctctagcaacacgcatcaaaccacatattacaaaagacaattgcttcatttcaattatggcaggtattccgattgattatattaaacaacaattagaatgccaaaatccagttgctagaattatgccaaacacaaatgcgcaagttggacactctgttactggcattagtttttcaaacaactttgaccctaaatctaaagatgaaattaacgatttagttaaagcatttggttctgtaattgaagtatcagaagatcatttacatcaagtaacagctatcaccggaagcggcccagcatttttatatcatgtattcgagcaatatgttaaagctggtacgaaacttggtctagaaaaagaacaagttgaagaatctatacgcaaccttattataggtacaagtaagatgattgaacgttcagatttgagcatggctcaattaagaaaaaatattacctctaaaggtggtacgacacaagctggccttgatacattgtcacaatatgatttagtatctattttcgaagattgtctaaacgctgccgtcgaccgtagtattgaactttctaatatagaagaccaataaaaacaaacccgccaacacatgtatgcatcatcgcaagcactgtgtttgacgggttatttttataatttattgttatttggcaagcattgtttattactttgtcattagattttaaaactatcaaaatcttttacaaaattaaaattaggtgtatcttcattttgtatcaatgtttgataaatttcatttatatcttctgtattatagcgattgctcaaatgtgtaatcaacgtacgtttaacattggcttcttttatcaatgcaaatacgtcttcaatatggctatgatgataattgttggctaaatgcttttcaccatcaatataggtcgcttcatgtaccatcaaatcagcatttctagaaatcacatgttcattagaacatggttttgtatcaccaaaaattgctacaactggaccctgtttggactcacctctaaaatcttttgattgataaacttgaccattatgttcaaatgtatcatgagattttacttcttgatatttaggacctggttcaagaccaatgttttttaacgcttcaacattgattgtacctgtagtttcaggtgccattactctatatccatatgatggaataccatgattaagtaaatgcgcttctacagtaaaaccatcatgatgatatgttagatgatcatcgatttcaatatatgtaattggatagtttaaatgtgactctgataaattcatagacatttccacatatgctttaattccttttggtccaactaatgtaagcggcttttgttcaccgccctgaaaagaacgactagaaagtaatcctggcaaaccaaaaatatgatcgccatgcatatgagtaataaatatatgtgtcacttttcctaatttgattgcatgatgtaaaatttggtgctgtgtaccttcaccaacgtcgaaaagccatatggaattggaatatggttctaaatttaaggcgattgcttgtgtatttctctcttttgtaggcaaacctgcactcgttccaaaaaatgtaacttccatatatgcccctccttttcttcaattcattttatcataaaatttgtatcaatttagttttaatttatacttgaatcaaaatctgttaaaaattcgtctttgctagttaatttttctaactttaacgtagacataactatataaattttgacaattacgttatacttatcattaataagtatcacattaaacatgatacatgaatcgatatttcatttaagacactgcatactgtcgagcatattgaatgacctgctgaatggattatcttataataataaatcatatatctaattaagaattgaggttttaatcttgagtactaaaaacaaacacatcccttgtttaatcacaatctttggtgcaactggtgacttaagccatcgtaagttgtttccatcaatattccatctctaccaacaagacaatttagatgaacatattgccatcatcggtattggacgtcgtgacattactaatgatgatttccgtaatcaagtaaaatcatcaattcaaaagcacgtaaaagatacaaacaaaattgacgcgtttatggaacatgtcttctatcatagacatgatgttagtaatgaagaaagctatcaagaattactagattttagtaatgaattagatagccaatttgaattaaaaggtaatcgactattctatttagcaatggcaccacaattctttggcgttatttctgattatctaaaatcttctggtcttactgatacaaaaggatttaaacgccttgttatcgaaaaaccattcggtagtgatttaaaatcagccgaagcattaaacaatcaaattcgtaaatcatttaaagaagaagaaatttatcgtattgaccactatttaggaaaagacatggttcaaaatatcgaggtattacgttttgcgaatgcgatgtttgaaccattatggaataacaaatatatttcaaacatccaagttacatcttctgaaatactaggtgttgaagatcgtggtggttattatgaatcaagtggtgcactaaaagatatggtgcaaaatcacatgttacaaatggttgcattattagctatggaagcacctattagtttaaatagtgaagatatccgtgctgagaaagtaaaagtacttaaatcactacgtcatttccaatctgaagatgttaaaaagaactttgttcgtggtcaatatggcgaaggctatatcgatggtaaacaagttaaagcataccgtgatgaagatcgcgttgcagatgactctaacacacctacctttgtttcaggtaaattaacaattgataactttagatgggctggtgtaccattctatattcgtactggtaaacgtatgaaatctaaaacaattcaagttgtcgttgaatttaaagaagtaccaatgaacttatactatgaaactgataaactattagattcaaacctattagtaatcaatatccaacctaatgaaggtgtatctttacatctaaatgctaagaaaaatacacaaggtatcgaaactgaacctgttcaattgtcttattcaatgagcgctcaagataaaatgaatactgtagatgcatatgaaaatctattattcgattgtcttaaaggtgatgccactaacttcacgcactgggaagaattaaaatcaacatggaaatttgttgatgcaattcaagatgaatggaatatggttgatccagaattccctaactatgaatcaggtactaatggtccattagaaagtgatttactacttgctcgtgatggtaaccattggtgggacgatattcaataattgaattaaaacgcacatgttaaacaaaaataaatgagcgaatgacaaggattgattacgaatcaagtaaatcaattgttctatcattcgctttttttctagactatattatgaaattatattttacaatgcccaaaactattttaataatcattgaataaatgggtgtataatttatagaaataatgtagaataaaaataaatgattgaattaattggagtgaaagttttggacgttatcaagcaaatacaacaggcaattgtttatattgaagatcgtttattagagcctttcaatttgcaagaattaagtgattacgttggtctttcgccataccatcttgatcaatcatttaaaatgattgtcggcttatctccagaagcttatgcacgcgcgcgtaaaatgacactcgctgcaaatgatgtgattaatggtgctacacgacttgtagatatcgctaaaaaatatcactatgcaaattcaaatgattttgcaaatgattttagtgattttcacggcgtatcacctattcaagcttctactaaaaaagatgaattacaaattcaagagcgattatatatcaaattatcaactactgagagagcaccctatccatacagattagaagagacagatgatatttcattggttggatatgcacgatttatagacactaagtatttgtcacatccttttaatgttccggattttttagaagacttgctcattgatggtaaaattaaagagttacgacgatataatgacgttagtccatttgaactatttgttattagttgtcctcttgaaaatggtttagaaatatttgtaggtgtaccaagtgaacgttatcctgcacacttagaaagtcgatttttacctggcaaacattgtgcgaaattcaatttacaaggtgaaattgattatgcaactaatgaagcttggtactatattgaatcaagtttgcagttaacattgccatatgaacgaaatgatttatatgttgaagtgtaccctctcgatatttcatttaatgacccattcactaaaattcagctttggattcctgttaaacagagtccttatgacgaagattaaaaattaaaaacaaagaagccccctaatatatctataggtctacaaatggcctcagattctattagggggcatattaatatgttaatttagttcgataacacatgcttcatatggacgtaactgttttaaattaactttggcatcataattaaatagctttacttctccatggcttaaatcaaatggtacagttaattctgcttcgtggttagtaagattacctacaataagaacttgcttttcatttaatgttctcgtgtacgcaaaaacttgtgaattttcagcatctactaaatcaaattgaccatatacgtatacatcattagactttcttaattgaattaaatctttataaaattgtaatactgaatgctcatcttctaattgttgtgcaacattgatagttttataattcggattcactgggaaccacggttcaccatttgtaaatcctccatttaacgtatcatcccattgcattggtgtgcgagaattatctcggttctcatctttatatttcgcaagtaaagcgtctacatctccaccttgagctttcactatttgatagtcatttttaacagcaacatcgttaaacgtttcaatactttcaaatggataattcgtcataccaatttcttgaccttgataaatgaatggcgtaccttgttgcaagaaataaacagctgcatgacttgttgctgattcataccaatacttgtcatcgtcaccccacgtcgatacacgtcgtggttggtcgtgattttcaataaacaacgcattccaacctttattttcaagttgtttttgccatctatttaatacagatttatacgaatttacatcaaagtgagaatcaccactattccacagtcccaaatgttcaaattggaatatcatattaaatttaccattttcttccccgacccagtcatcagcatcatcagggcttacaccattcgcttcaccgacagtcataatgtcatacttacttaatgagcgatctttcatctcttgtaaccaagtttgtatacctggctgattcatatctacatcaaatgctggggcatatgttttaccctcaggtacaggtaagtcacccgcttcaaacgtcttcttaatatgcgtaattgcatctactctaaatccatcaatgcctttatcaaaccaccagttcatcatttcaaatacagcatctctaacttctggattaccccaattcaaatcaggttgttttttactgaataaatggaaataatattgctcagtattagcatcatattcccatgtagatccattaaagatactttcccagttgttaggttcagagccatctggctttggatcttgccaaatataccaatcacgtttgggattgtctttactagatttagattctataaaccaaggatgttcatcagatgtatgatttacaactaaatctaaaataagcttcatgcctctatcatgaacaccttttaataaacaatcaaagtcttccatcgttccaaattcatccataatttcttgatagtcactaatatcataaccattgtcatcattaggtgatttaaacattggactgagccaaatgacatcgatacctaaatcttttaagtagtccaatttatcaatcattccaggtaaatccccaataccatcgtgattactatcattaaaacttcttggatatacttgatatgctactgcttctttccaccattgcttattcattttaaaactcctttgctatcgctgtgttgattttcttatttttaattctgtatctataatgacgagttcaataacatcctgtgctttgtttttcaatatatttaaaattgctgaaccagcctgttgacctaacattcgaggcttgatgtcaatacaggtttgaggtggtgacgcaatttcggttaaataagaatcattgaacgttgctgtcattacatctttcggaatttcaatattaagttcatataggacacttaaaatcgctaaatgtaacatagcatctaacgaaatgattgcctgtttaatatttgggtccttcaaacgcgtatgtagattttgcatgtaattaaaaataacttctctttcattactagtctcaataatttgataatccagattaaattgtgatgcaactgtttcaaatccttgaatcctgtctttcgaaacttcaaaatcgcctttttctgtaataaatattaattcatctacaccttgttcaataacatgtcgtgtcaaattttcagaagctaatatattatcattatctatatgtgtaaattgatgatctatatccgatgtaggcttaccaatcacaataaatggcatgctttcatcaattaacatttgtttaatcggatcattttcttttgaatagagcagtataaacgcatcaaccattcgttgtttaatcattttataaacttcatccattaaatcattcatattatttgagactgtcgtttgtgtaccatagccatgctggttacatgtttcagaaatccctagcaatacattgatgtagaatggattcagtcgaataggctcctcagacccttttaacactaaaccaattttatatgtttggtttgtaattaaagttctagcagcggtattaggaaaataattcaattcttccataactttcttcacttttgaaattgtcgcttcgctaatacgtttatttccttttataactcttgaaactgtcgaaggagaaacaccggcttttagtgcaacatctttaatcgtaaccatttaatcacctcctgttaatttctgcattggaaaacgcttccaacctctatataataacagtttagtcactctttctaaaaaagtcaaaagatttgtgcaaacgattgcataaagcgataaaaataaaaccttcatactgaaattcaatccgaaaatcaatataaaggtttgtataaatattaaaatcgattttttagtcactaactgcaaaatagttaccttggccatcttgaaaattaaatacacgttgaccattcatttctactatatcatgcacagttaaacctaaatcatttaattttgagtataatgcatcaaagtttttctctttaaacattaaagatggtgttcctaggttcacttccgggctatacttttcaataaattcttttgccataatcgtcaatgacgtttcagcatctttcgtaggtgatacttcaactgcaacatagtcctcagctaacggtgtttcacttacaacaacaaattctaaagtttctgtccaaaatgctttcgctttgtcaacatcatcaacatataacataacttgatttaacttttccataagttaatacctctatttctctatagtacatgctatcataacacagtaaatattttattacttcacaaaatgcttaaaaatatggcgggatgcttttaaggtcaaagataatacttgtgtaattttttataggttgtagctactctatcacactctcttttatatttatcaaaagatataaaaaaggatagtatctttcaactatcctttaatcaatattattcttcaatccattgtgtatggaatacgccttctttatcttttctttcgtacgtgtgagcaccgaagtagtcacgttgtgcttgaattaagtttgcaggtaaatcagctgcacggtaactatcatagtaattaatacttgatgagaaaccaggtgttggtacaccattttgaacaccagttgcgacaacatcacgtaacgcatcttgatattcagtaacgatgtttttaaagtaaggatctagcaataagttttgtaatcctggattattatcgtaagcatctttgatcttttgtaagaattgtgcacggataatgcaaccttctctccaaatcatagctaaatcaccaagttttaaattccattcattatcttcacttgctttacgcatttgcgcgaaaccttgtgcataagaacaaattttactcatatataatgctttacgaattttttctaaaaagtctttcttgtcaccatcaaatgatgcttttggaccatttaattctttagaagcatttacgcgctcttctttgattgaagagataaaacgtgcaaatacagattcagtaatgattgttaatggaatacctaattctaatgcgttaattgaagtccattttcctgtacctttttgacctgcagtatcaagaattttttcaactaatgcttctttattttcatctaatttcatgaaaatatcaccagtgatttcaattaaataactttctaattcaccagcattccagtctttgaacgtttgagcaatgtcttcatgagacatgcctaataattctttcatcatagcataactttctgcaattaattgcatgtcagcatattcgataccattgtgtaccattttcacatagtgtccagcaccattaggtccaatataagtaacacatgaagcaccgtcttttgcctttgcagcaattgcatcaagaatatctgcaactttgttataagcttcttcttgtccacccggcattaatgacggaccagttaacgctccaatttcaccaccagaaacgcccataccaataaagttgattgcactttgtgctaatgctttattacgtctgatagtatcttgatagtttgtattaccaccatcaattaaaatatctccatcatctaataaaggtaacaaactatcaatcgttgcatccgtagctttacctgcttgaaccattaataaaattttacgtggtttttctaaagaattaacaaattcttccaatgagtacgttggatgaatatttttcccttttgattcttcaaccattaaatcagttttttcacttgagcggttaaatacagatacactatatccgcgtgattcaatattccaagctaggtttttacccataacggctaaaccaataactccaatttgttgtgtcatattacttacctcacttgttgatttttcattagtattgtatcacaaaatagacatacactacactaaatcatttcaattgtcgcgcaactattttgattatttctaacacttgacttgcaagcaagttcaatgatttaatcggcattctctcatttgttgtatggattttttcataacccactcctaaaatgactgaaggaataccaaatgtattaataatactgccgtctgaaccgccaccagaaataattgtatttgcagataatcctaaattacgagcactttcttgtgcaattttaacaaccgtttcattatcattaattttaaatcctggataactttgctccactgttactactgctttcccacctaattctgatgcagtagtttcaaacacatcagtcatatgtttgacttgtgtttttattctttctggatcgtgagaacgtgcctctgcttctaaaatgacttcatctgcaacaatattcgtagctgaaccgccatgaaacttaccaatattggcagtagttatttcatcaacttgtcctaatttcattcgactaattgctttcgccgcaatattaatagcactaacaccctcttttggcgtacttgcatgagccgttttgccaaaaattttagctgaaattaacatttgcgtcggtgcacctacaaccgtagtgccgacatcagcacttgcatcaatagcataaccaaagtccgcgtccaacaactctgaatttaattctttagcaccaattaaacctgattcttctccaacagtaatcacaaattgaatttgtccatgtgggatttgttgttcctttatcacttgcaaaacttcaagcatcgctgctaatcctgctttatcatctgcacctagtatagtcgtaccatcagagtatatgtagccgtcatcttttacaattggctttacattaattgcgggtacaacagtatccatatggctcgtcaaatataatttaggtacttcgccttcttcgatagtactattcattgtacacactagattattggcacctaatttaggatgtttagccgcttcatcttctttaacatctaaccctaatgctatgaatttttcttttaaaataggttggattgttgattcattccctgtctcagaatcgatttgtacaagttctaaaaacgtattaagtaatctttgctcattaatcataatggaaccccttttatcaaaattttcatgtacgccaaacggtaaaaattgatgaaataaaatgttacagtaattgacgttacacagatttatcaggtttgtaaattgtgtcatattattttcaatttattatatataattattgtaactcaaactaagctttgtcaaaaatatattgattgatttttcaaagatatcgtataatgaggaaaatgacataagcaaacttactcatgttttttattatattcctttatgatgattgctagttatatcgtctcaagttaaaagttttatatcttatgtcgtaattattaatacaaaggttattcatttggaggcacacaaaatgcaaaataaagttttaagaattatcattatcgttatgcttgtatcagttgtattagcattgttattaacgagtatcattccaattttataaactatatctcaactacctatacaaaatcatacaattaaaaatccatccattataaacgcatgtattaataagttatcgtattgcaacgattactttcaaacatgggtcatacggatggattattttttaagctacttcactatgcattttcaatgaaccaaattgcgatttgatttgtaaatattcttctaattcatttaatatttgaataatacttgctctcgagttaagcgctttgtgtgttgttggcaatggcagttcatccaatttcaaacgcgtctcatacaaattgtgtaaacgcattgctgtatagtcattactattcacatttagaccaatttctttcagcagtgacgcaacatcatttaaaagcggatctttatgacagatactttcgatgagcggtttcattctcattaacaattccacttgctcttctcgcatatcaaaataatgatagtatgaattttcgtttctaacaaaatgatttttaacatctcggaacgcgatagacttcgcctttttaatatttaaaagtaacacttcaaattcaatcgcaatggtatcttcatatttttcacaaatataactatatttactaaaaatatcagcaatttgttgctcaattttacatttgtattcgtctagttgtttgtctaaacttggcatcattaaattcattgtaaatgcaatgcttagtccaattaacagtaataatgtttcattaacaattaaatgtgcatcaattgattttgcattaaaaacatgaagtaatataacgcaactcgtaatgacaccttcttgtacttttaatacgacagttaatggtataaataacaatacgataataccgagtacaattggactctgacctaataaactaaatattgctgaacctaaaaacaatactaaaaaacatgatactaatcttgaaataatcgcttgtagcgaatgtacttttgtatgtttaatacataatacgactaatatggcgcttgaagcataattatctaaacctaacagcttactaataattacacctaaagtcatacccactgctgtttttattgttctaaatccaatcttgtaaggatttaactttaacatgggttagcgcctcttatctttcttcacaatatttattgaataatgtttgtaattgattaattacgttcatcacatcatgaccttcgatttgatgtctttcaatcatttctgtaatctttccatcttttactaatgcaaatgacggacttgaaggcgcataaccttcgaagtattcacgcgctctttgtgtcgcttctttatcttgtccagcaaatactgtcactagacgatcaggtaatacgtcataatgtaaagcatgtgatgctgctggtcttgcgataccacctgcacaaccacatacagaattgatcataactagtgttgtaccatcttgtttaagaactttgtcaacatcttctgcagtagttaattgctcatatcccgcagattcaatttcattccttgcttgttctacaacaccgttcatgtataaatcgaaattcatgtccataagttcaatcacctatccctttatatttaaactatcctcattctactaattaataacatattgttcaataaactaatctgaatcacacctatatttagacacaattttaacaatataccaaacattattgtgcttaaaatcatggtaactaatttgttcacctgttttcattaatatgtttcaagtatgatgtattattttgactttactgcaaaaatgcattcaaccatgttgattattgttctttatcttttttgaatatattgcacatattttagtgccaaaaaataatacatccatcgacaagaacaagataaaacaagttgtcgatagatgcatctatgttatcactaatatatatttgtattttctaaagtatactgttcgatacgctgtttaatatgattcataaatttacctgtttgtaaaccatctaaaatacgatgatcaattgaaatacataaattaaccatgttacgaattgcaatcatatcattaattactactggctttttaacgattgattctacttgtaaaatcgctgcttgtggatgatttataatacccattgatgatactgaaccaaatgtaccagtattatttaccgtaaatgtaccgccctgcatatcttcagctgtcaattgcttattacgcgctttcgttgctaaagtattaatttctctagctatacctttgattgacttttcgtctgcatgcttaatcacaggtacgtataatttattttcatcagcaacagcaattgaaatattaatgtctttatgtaagacaatttcatttccttgccagctactatttaataaaggatatgcttttaaagcatctgctacagcttttacaaagaaagcaaagaacgttagattatatccttctttatttttaaagctgtttttataatgatttctcgtattcacaagatttgtagcatctacttcaatcatcatccatgcatgtggaatctctgttacactattaaccatattttgcgcaattgctttacgcacaccatttactggtattgtgctgttttcactattgtcttcagatgattggttacttgatgtatctactgatgttgattttgtttgaacttgtttgtcagattgagctgtggtaccaccattttcaataactgacattatatccttcttagttacacgaccttcaaatccactacctacaacttgtgataaatcaatgtcatgctctgaagcgagtttaaatacaacaggtgaaaagcgaccattattacgtggttgattttgtttagcagtagatgtctgttccactgttgcactagcttttttagtagatttctgagtatgctcatccacttttgcttgtatctcttcagttgtttcatttgtcttttcatcagcagtttcaattttacagataattgtatcaatagctactgtctgccccgcttcaactaaaatttctgtaattgttcctgatatcgtggaagggacttcagctgtcactttatctgtaataacttcacataatggttcatattcatcaatatgatcaccaacagaaactaaccattgttcaatggtgccttcatgaacactctcacctaacttaggcattgttatttccatgactttccctccctagaattctgctaattcacgcattttatttaagattttttctggattcatcataatttcattttctaatacaggagaaaatggcatagatggtacatctggagcagctaaacgcatgattggtgcatctaaatcgaacaagcaatgctctgcaataatcgctgacacttctgacataatactaccttctaaattatcttcagttacaagtaaaactttacctgtatgtttagcacgatcaataattgtttctttatctaatggataaacagttcgtaaatcaacgacttcaacattgataccgtctgcagctaaaatatccgctgcttgtaaacaataattgaccattaatccataacaaaatactgttaaatcttcaccttcacgtttcacatctgcttttcctaaaggtacagtgtaatattcttctggcacttcttcctttaagaaacgataagcttttttatgctcaaagtacaatactggatcatttgattcgatagatgataataaaagccctttagcatcatacggtgtggaaggaataacaattgttaaacctggcgatgaagcaaatatactttcaatactttgtgaatgatatagtcctccgtgaacaccgccaccaaatggtgcacgaatcgttaatgggcattgccaatcattatttgaacgataacgcattttcgcagcttcactaataatttgatttgtcgcaggtaaaataaaatctgcaaattgaatttctgcaattggtcttttacctaccatagctgcaccaatggcagttccaacaatatttgactcagctaatggcgtatcgataactctgtcttcaccatatttttgttgcagtccttgagtagtaccaaatacgccaccttttctaccaacatcttcaccaagaataaacacatctttattttgttgtaatgctaagtcttgtgcctggcgtatcgcctctaaataagataatttagccattagttaagactcccttcttcgtacacaaatgcataggcttcttcgacacttggatatggcgcgtcttcagcagcctttgtcgctttattgatgatgtctttatgctccgcttctatttctgccaaccaagcatcatcgataatgccagctgaaagcaactcttttttgaacttttcattgcagtctgcttttttaagcgcttcacgctcttctttcgtacgatattggtcgtcatcatctgatgaatgagctgtcatacgacttgttactgcttcaatcaaagttgaaccttgaccagaaatagctcgatctcttgcttctttcatcgctttatacattgctaatggatcattaccatctacttgttcaccatgtataccgtaaccaagtgctctatccgataatttttcagctgcgtattgtaatgaatcaggtactgaaattgcatatttattatttataatgacacatacaaaaggaagtttgtgtacacccgcgaagtttaaaccttcatggaagtcaccttggtttgagctaccttcaccaacagttgctgttgcaattttcttcttaccatccatttttaaagctaaagcagcaccaacagcatggggtatttgagttgctaccggtgaactttgagacaaaatattcttagctctactactaaagtgtgatggcatttgttttccaccagagttaacatcgtctttctttccaaacgctgataaaaacgtatcatacgctgagatacccatataagtaacgaaagctagatctctataataaggcgctgtaatatcaccttcttctaatgcgtatgccatcccaatctgagttgcttcttgtccttgaccacttacaacaaatggaattttacctgcacggttcaataaccacagtctttcatctatttttctacctaaatccatccatttatatattacttttaggtcttcttcgctaaggcctaatgatttataatcaatcatgttaaatcctcctatttatacgtgaatagctctactttctgctttcaatcctaattccatcaacacttcagagatggaaggatgtgcgtgtgttgttagtcctaattctaatgccgagccattcatgaactgtaacagtgatgcctcattaatcaattctgttacatgtggaccaatcatattaatacccacaatttcttcagttgattgatcaatcaccatttcgctatacccttcgtttgtgtcatggctatcaatcactgctttaccaattgctttaaatggtactttaaaacttttaactttcattccctctgcctttgcttgttcaatgtttaaaccgatagaagcaatttcaggttgtgaataaatacacttaggcatcatgttatagtttactgggattgggttcccctcaaacatatgatcaacagccacaacaccttcttttgatccaacatgtgccaattgtaattttcctatacaatcaccagctgcataaatatgtttatcttcagtttgttgaaattcgttcgttaaaatatgtcctgatgttgaaagttttattttagtgttgtttaaaccaatatctgatgtgttaggttttctaccaatcgatagcaacactttatctactttaattatgtctgaggaaatttcaaacgtaacaccatcttcgttaacatttatatcattttcagaaagttttattccctcatagaatttaacaccacgtgctgacaatgatttttttaatagttgtgaagcttgtttactttcagttggtaaaattctttcacctgcttctataactgttacgtcaacacctaaatctatcatcaatgatgcaaattccattccgataacaccaccaccaataataccaatacttgatggtaacgtctttaatgataatatatcatcgctagataaaattttatcatgatcaaatgataagaatggcaactctgcaggcgaagaaccagttgcaattaatacaaattggttgggtaataagtctgattcaccatcttcatattcgacagaaattgtgccactttgaggtgaaaatatagatgtacctagaatacgtcccgtgccattataaatgtcaatgtgattgtgttgcattaaatgctttacaccttgatacatttgattaataatgtcttcttttcgtgccaacatattttcaaaattaacattagcatctttgacatcaacgccaaacattgctgcctgttttactgtttgaaatacttcagcagatttaagcagcgatttagtaggaatacaacctttatggagacaagtacctcctaatagttgtcgttctactattgccacttttttacctaattgagacgcacgtatcgcagcaacatatcctgcagtacctccaccgagaacgactaaatcatattgtttctctgacatgttcttactcctaactaatgatatatatccattgaaaatttattaatacatagttttcatgtccattaattacctattttacatgattgtctatttagtttgaatgcacataaataaatccataaatgagtattcaacacactttggaaattatctacgtctttgattgtgttgtatcatttctcttgcattttctcgagttaaatcagtaacacttgcacctgaaatcattcgtgcaatttcatctactttatcatcgctaattaactcttgaacttgtgttgttgtacgatcatcttttgatgatttcgaaattaataaatgatggtcgctcatcgatgcaacttgtggtaagtgagagatacaaataacttgtatatattctgctatatctcgcattttctctgccattttttgtgcagcttgtccagatacacctgagtcaacctcatcgaataaaattgcagtttgacctctcgatttaacaaaaatactttttaacgctaacataattctagaaagttctccacctgacgcaattttatttaaactttttaatggttcccctttatttggactgattaaaaattctacaaattcgattccatcaatattcggttcttctaattttttaaatgaaatctcaagatttgcgtctttcatttgtaagttttgaatttccgatacaatgtggtctcttaactccctagcgactatacgacgctgctttgataacgcttgtccaacctctataacttgattatacaatgcatttatttcttctcgtaactgcgatgtactttgttcatagttttcaattttattgatttcattattaagcttttcttgatatgcgattaattctgaaatatcttttccatatttacgttttaaattattcagcaaattcatacgagattcatactcgtttaacacttgttcgtcgaattctgtattagccatttcatcatataactcatgttttgcatcttctaaaatgtagtaaaattgatcaatatcttcttttaatttgtcatatttgtttggaactatatcgtttattgttaacaaatggttgcttagttcatataaacgatcagtgatagcattttcatccgttaatgtcatatgtgcgttattaagcgctaagcttaatttttcagagttttgaatgcgtttaatatctatttcaagttgctctatttcgccttcttttagatgtgcttcagacaattcttctaattggaatttcattaaatctaaacgctgtagcaatgcttggtctgctgattctaaatcttctaactcttgctttttggctttataattttgaaaagtttggtgatatttatccaacaaatcttgataacgtgattctgcgtaattatccaataatgttaaatggtatttttgtttcaacaaagactgcgtttcatgttggccatgaatatctaataattcttgcataacttttcgtaaatcttgtaaagtaactgtttgattattaattttacaaagacttttaccagagctgaaaatttcccgtttaactaataaaaaatcttcatctacatcaatatccatatttttcaatatatgtatagcatctttactctcgtcaatatcaaatataccttcgatgacagcctttttttcaccatgtcttacaaaatcagatgaagctctcattccaattaattgtccaattgcatctataataattgacttacctgaacccgtttcaccacttaaaacagttaaaccatcagaaaattgaatttctaattcttcaataatagcaaattgcttgattgataaggtttgtaacataaactcatcgcatccttataacaaattgaaaattcttgacttgatttcatcacttgcctctttgcttcgacaaataattaaacaagtatcatcaccacaaattgtgcctagtacttcttcccaattgatttggtctaatatagctccaatagattgtgcattaccaggtaatgtttttagaacaagtaaattatcagtaccatctatattaacaaaggaatccattaaataacgtcccaatttttctaaaggatggaattttctatcatttggtaaactataaacatattgacctgaaggtataggtactttaataagttgtagttctttaatatcacgagaaacagttgcttgagtgacatttaaatcataatcgtttaatcgtttaactaattcatcttgtgtctctatctgttcatttgaaataatttctctaatttttatatgcctaaccgattttttgggcacagtaaacacctctgattacgaatatttatacatttattttaacacatgcactgatttacgactactaaacacctttacgtaaaaagggtaaacatggtttatctatcttggttatctatttataaatatttttcatattacgcataacaattgcttaaaatatgtataaaaatgaatatatgtgtaataaacttgctaattattagatttaataagcgtcaattgtttgaacatatttaattaaaatcacattgatatcacagatacgaatattgtcgtatagaaattgaaaattctattttttaaatgaaagtcttcaacataattttaagtttcaacatgagaaaaatcgattaacaaacaacgtcagttgaatatgccttttgagacatttcaaactttacaattgttgctaatcgatatatttgcttttagtgatccctgctataaaataaatcaacgatttctaataagtgttttgtattgaattgttcatcaatttgcgttagttcatccactgctgcgtctctatgataagtcaatttatcttctgcgccatctttccctaataaactcacgtacgtacttttattattttcaagatcgctgcccacttttttacctaactttgcttcatcaccatagcagtctaataaatcatctttaatctggaacatcatacctaaatgataactataactttctaaatgttctttagttgtatcatcgacattagcgatatctgctgcactcataaccgcaaaagttaataatgctcctgtttttgttttgtgtatcatttccaaagtttcaagatcaattggttggccttcgctttgcatatctaacatttgaccgccgaccattccaacatgaccacttgctattgacagccgttgtagaacttttatttttacttcatcagttaatctatcatcacttgaaataagttcaaatgctttagttaataaagcatcacctgctaatatcgcagtccactcaccatatactttatgatttgttaattttcctcgtcgataatcatcattatccatcgctggtaggtcatcatgaataagtgaatatgtatgaatcatttctagtgcaattgcgctcttcatacctaactcatactcggtatttagtgaatctaaagtgagtaataacagaactggtcggatgcgtttacctccagcatttaatgaatacaacatactttcttctagctgagtatccattactgatttatttatcgcaaccgataattcattattgacttcatctattaatttattcatcggtagattcgtcattttttacatcctcagcttcttcttttattaagtcattcacctttttttcggcattttttaaagttgtgtcacaagctgctgatagtttcataccacgttgatataaatctaatgattcctctaaagatactgtttcattatctaatttttgaacaatttgctctaattcttgcatcatttcttcaaaactttgcgtttctttagtcattattacaccttactttcgtaacttttgcatctactaagccatctttcattgttaacgtcaattgatcattttctgttaaatctttagtactcgtaatgacttcgtcttttttattaacaattgcatatccacgcaacattgtattagttggacttaaattgtttaagttttctactttatttttcaaatcatttttataacttaatatcttagaattcaataatttaacaagttggtttgtcaattgaagattattttgttgttcttgattaacactacttagtaatgcttttaaattataacgttgttgcaacagcattaatcgatgtctctgttgttcaaaagttgcctgaatttgttgtttcagtctcttttctaaatcatctcgacgttgtatctgttgatcatacaataaagttggttgtttaaacttgtaatacgatgacaaatgttcaacatgtttacgttgttgttctaaatgtttcttgatgaaacgagtcaatgtaaactgatattgctgtatttgttgcagcaattcatattggtctggtgttgcaataacagcagcttgagttggagtcgcagctctgatgtctgcagcaaaatcacttaatgtaaagtctgtttcatgacctactgctgatataatcggtgtcttacaattatatattgcacggacgacagcttcttcgttgaaattccataaatcttctatggatccaccacctcgacctacaataatggtatctacacctaaactatctgcatattcaattttttcaataatgtcgtcttttgctttttcaccttgaaccaaagtactaatttgtatttgttcagctaatggaaaacgactatttatcgttgaatggatatctcgaattgcggcacctgtactcgctgttaaaactgcaatttttttaggaaacttaggtattgatttcttattcgctttatcaaaacaaccttcttcagttaattttttctttaatgcttctaatttttgatataagttccctataccatctaattgcattttatttacataaatttgatagtttccacgacgttcaaaaacagaaacacgtgcttctaataagacttcatctccttctttaggttcgaagtttaatttagaagcactacctttgaacatcatggcacttataacgctctctttatctttcacattaaagtataaatgaccacttgaatgctttttaaaatttgaaagctcacctttaatcaatacagattggagatgtggatcttgatcaaatttatatttaatatatttcgttaaagctgaaacacttaaataatctgacatataacatcactcaattttattttttatattactcaatacaccatttataaatttataatgatcatcatcactgaattgttttgttaattcaactgcttcattcattacgactttagcaggtgtatcactgtgtaatatttcatatgttgccattcttaaaataatacgatccgtttttaataaacgtgcaatagtccaatcttttaaataaggactaattgtctcgtctaatacaggttcgtgatctttaacgccagaaactagccaatgaataaattcgaagtctaaatctggattatcgtctttaataaagcttatcgcttcatttatcgttaaatcactgtccttcatttctaattgaaataaagtttgaaaagcttgcactcgggattctttacgactcatttttaactccttcaaacgtttgtatttttctttatttaattactgaattaggtatgacattacttttcaataacgatttgtgtaatgtgaatattaatttgcttaggttctatcgctgtcatattagaaattgaattaaaaattgacgtttgaattttgtttgcagtttttgaaatattaacaccatgttttaatgcacaatatacatctatatatatgccatcttctttactctcgatttttaaatcacggcttaaatttttacgactaactttttctaaatttgtttcttttaattcagcaaaatggccagtgatgccttcgacttccgaagtagctatacttgcaataacagatagcacttctggcgctatttctactttacctaattttgaatttgaataatcagttactttgaccatggattgacctcctattaaccttcatcattcataatgctattttgctctaaaaagtttgtattaaatttaccgcttctaaatatatcgttattcaataatttaatatggaatggaatagttgtatcaataccaagaaccacaaattcacttagtgcacgaatgccagccataatcgcttcatctcgtgtcggttcatgtatgattaatttcgctaccatcgaatcataatatggcggtatcgtataattagtataacatgctgactctattcgaacaccatatccacctggtgcaagatattgctcaattttacctggtgatggcataaagttcttgtaaggattttcagcattaattctaaattcaattgcgtgtcctgttaatttaatatcttcttgtttatacggtaacacgtcacccatagcaacttgtaattgtaatttaactaaatcaattcctgttaccatttcagttacaggatgttctacttgaatacgtgtattcatttccataaaataaaatttattatcatttaaatcatatataaactcaattgttcccgcattttcataatttacagctttcgctgcacgaactgcggcatttcccatttcacgacgtgtttcatcatctaaaattggggaaggtgcttcttccactaatttctgcatacgtctttgaattgtacaatcacgttctcctaaatgaattacattaccatagctgtccccaacaatttggatttcaatatggcggaagttttcgatgaatttctccatataaagtccaccattaccaaatgcagtttgagcttcttgttctgtcattcggaagccagtttcaagttctttttcatcacgagcaacacggataccttttccgccaccaccagcagtagctttaatgatgaccggatagccaattttcttagcgattttcttagcttctgagacgtctttcattaaaccgtcactaccaggaacaactggaacattggctttgatcatttctgccttagcaacatctttgatacccattttttggatagattgataacttggtccaatgaacttcaattggcatgcttcgcataattctgcaaaatcagcattttcagctaaaaagccataacccggatgaacgccatcacaacctgtagaagttgcaatagataagatgttcggaatatttaaatatgaatctttagacaaagtgggacctacgcaatatgcttcatcagcaatttgagtatgtagcgcatctttatccccttcagaatagattgcaacagtttggatgcctaaatcacgacaagcgcgaataatcctaactgcgatttcaccgcggtttgcaattaaaacctttttcattatttcaccttaaataacggttggccatactctaccatttgtccgtcttctactaagatttcaacaatttcacctgaaatttctgcttgaatttcattaaatagtttcattgcctctaaaatacacactgttgtttcatttgaaacagtgtccccaacttgcacatatgcttcttcgtctggagatggcgatttgtaaaatgtacctaccataggtgcattaattgttttgtgattatctgaagttggctttggagcttcagttttattgctatcagttgattgtgcttgaggcataggcattgccgcagcttcaactggcatttgtgagatttgtggcgtgataatctcagtttctttttctttcttaagcgtcactttgcctttagtatcttcaatattgatttccgttaaagttgatttatccagaatttcaattaattctttgatttctttaaagttcattattactgactccttcagtttgttttcatctacccgtctattttacttgagacaactcttcaattcaagcatgttcatattgctggcgacattataagtctatcccaaagttataataaaaccacattttaaattaaaaacacttgtgtatttattacttaacattgactcatcttaactcttgattaaaaattttatgcattcagttaaacatatcaatgttatttttattagctattatgttttatcctcaacaatatgatatgtagatatatacctttactcatgtctatgttttttcactaccaattagacgattcgttttatattttaaaaattattttaaaaataaaaagcctcatatcagcatataacctataatcattttaggcaatagctttatgagacttatttagaatatcttacgttaaatcagtatagtgaatacaagctatttgttaacaaattagagattatcctcttgaaatgtagcttccatcaccagtgttgataattaaaacgtcaccttcgtttacaaataaaggtacatttaatgtataaccagtttcaacagttgccgatttagtggcaccagttgcagtatcacctttaataccaggttctgtttcagttactgttaattcaacagttttaggtaattcaacaccgatagtttcaccttcgtatgtttgaatttgtacttccataccttcttttaagtaattcaattcttcttttaagtaatcacttgaaagttctgtttgttcaaagctttcattatccataaatacatgattatctccgtcagcatataaatattgcatgcgacgattttcaatcattgctggttcaactttttcaccagctctaaacgttttctcttgaattgcaccagttcttaaattacgtaattttgaacgaacgaatgctgaacctttaccaggctttacatgttggaagtctataactttccaaatagcgttatcaacagaaattgttaaacctgttttaaaatcattaaccgaaatcattcagtttcctcctcattttacacgcttatgttaaaactataaggtcttttgtgcatttagtaaagacttgacaaccattttctgtaattaaaatatcatcttctattcttataccgcccaaaccttctatataaacaccaggttctactgtaacacagttgttaacttgaagtttatcttgtatcgtacgagccagcattggcccttcatggatttctaaaccaataccatgtcctagtgaatgtccaaattcttttccatacccttttgactctaaatagtttcttgaaatggcatcagcttctgcaccagtcatgccaggtctaatctcattaattgctttcatttgagattcaagtactatttgatatatttctttcagtttaggatctggttctccaatagcaaatgttctagtaatatctgaacaatagccgttataatacgcgccaaaatctaatgtaatcatgtcgcctttttcaataattttatcacttgcaacaccatgtggtaatgcacctctatgaccagatgctacaatcgtatcgaatgatggtccatctgctcctaattctagcattttgctttctaatattgcctttaattctttttcagtcatgcctgcttttacaacagttaaaatatattcatatgtttcatcaacaatattagctgctttttgaattaaagcaatttcgtcagcatctttgacgtctctaattttatctacagtattagaaatgcttattaatgatatacggcttttatttaattcaaggtatgtatcataacttacatgatgcccctcaaaacctacattttcaaaattttcttggtgtagcaattctttaatctcaccaataatagtagatttacgattaataatttcataatttggcgcctgcttagttgcttgatcaatatatctaaagtctgttatcaaatattgtttatctttagatatgataagtgctccactggtaccagtaaaacctgataaatatcttctattgtaatccgaaagaatgataatcgcatctaaatgtttttgttctaaaatacgatgcacttgtgttattctgctcatcttattacctcctagtgaaacgtttgtgcatttcaactttatacattaaaataatatcataataaggataaaaaataatagatattgattttagggagatagtaatgaaaaaattggtttcaattgttggcgcaacattattgttagctggatgtggatcacaaaatttagcaccattagaagaaaaaacaacagatttaagagaagataatcatcaactcaaactagatattcaagaacttaatcaacaaattagtgattctaaatctaaaattaaagggcttgaaaaggataaagaaaacagtaaaaaaactgcatctaataatacgaaaattaaattgatgaatgttacatcaacatactacgacaaagttgctaaagctttgaaatcctataacgatattgagaaggatgtaagtaaaaacaaaggcgataagaatgttcaatcgaaattaaatcaaatttctaatgatattcaaagtgctcacacttcatacaaagatgctatcgatggtttatcacttagtgatgataataaaaaaacgtctaaaaatatcgataaattaaactctgatttgaatcatgcatttgatgatattaaaaatggctaccaaaataaagataaaaaacaacttacaaaaggacaacaagcgttgtcaaaattaaacttaaatgcaaaatcatgataggagtcttttaatgcgtaatataatattttatcttgtacttattattgctgcgattggattagtaatgaatctagatgcctttattttttcaatcgtcagaatgttaatcagctttgctgtaatagctggtattatttatctgatttattatttcttcatcttaactgaagaccaacgcaaatatcgcaaagcaatgcgtaagtataaaagaaatcaaagaagaaaatagataaaaaaacggaagcacttgtaggtaaaatagtctacgtgcttccattttttattctaaaaactactttctaaacatccattcatctgaacgatatttttcagttaattcttccacttctgccaattgagcttctgttaattcaagtggctttaattctatatttaaacctttcttaaaacctttctcgaaagcttcttccatttgactaatagtaatgtgtttatctgaaatatcattgatggcaactgctttttcaacgaatgcctctttcatttttaattttaatctttcatttttataaataaacatatcaaacagttcatcaatatcaatatcttgtaaaatcgaaccgtgttggaggattacgcccttttgtctcgtttgagcactcccagcaatcttacggccttcaacaactagctcataccaacttggtgcatcaaaacacactgaacttcgaggttgttttaatttttgacgctcttcaggcgttttaggtaccgcaaaataagtattaaatcctaagtttttaaatccttctaataatccttgtgaaatcactctgtacgcttctgtaactgtagaaggcatattcggatgcgattcaggcacaatcacactgtaagttaactctttatcatgtagcaccccacggccaccagtttgacgccttacgagaccaaaacctttctctttaaccttatcaatatcaatttctttttgtagcctttggaaataccctattgataatgttgcaggattccatgtgtaaaaacgtataactggatcaatttcacctctagagacaaaatttaataacgcttcatccattgccatattataatatgggtctttacttcctgtattaataaaattccaagtttcagtcatattcaagaactcctatcagcaaaatgtataatatttgattcgctaattaatcaatttaactaaatgaataataattgcaattctttagtgaaatattttgataatttgacctaacagtcttataattatattatcgtttaattagggaggatgcaagatgagtgctagtttgtacatcgcaataattttagttatagcaattattgcttatatgattgttcaacaaattcttaacaagcgagctgttaaagaattagatcaaaatgaattccataatgggattagaaaagctcaagtcatcgatgttagagagaaagttgactatgactacggtcacattaatgggtctcgcaatattcctatgacaatgttcaggcaacgattccaaggattaagaaaagaccaaccggtatacttatgtgatgccaatgggattgctagctatagagccgctcgtattttgaaaaaaaatggatatacagatatctatatgttaaaaggcggctataaaaaatggactggaaaaataaagtctaaaaaatagttttgtaaatttaatatacgatttaataaaatctgagtgttaattgatcatcaataacaatactcagattttaattttttaacaaagtctgttactatatttctctagcttcactaatcattaaacttagtttcagcataataaagaaagttcagctcattttcaatacgattcaattaccgcaatctaaaaaatgaaaagacaatttctatgaaagaataataccaaaccctaagagttattacttcggtttagttttcttgttcaaatagaaattgtctttttcaattgattttgaaaccattatccttaaatcttcatacaaagttagaataataattctcggaatatgtgtttaatactttatttttcctgtttaagattttcaaactttaatattggtttacgagcagctgtagcttcgtctaatcgatcaatcacagttgtatgtggtgcttctagcactttatcaggatcatttttagcttcttcagcaatactaattaatgtatcgataaaataatcaagtgtttctttagactctgtctcagtcggttcaatcatcataccttcttcaacatttaatgggaagtatattgttggtggatgtacaccgaaatctaataatcgcttagccatgtctaaagtacgtacaccaaattctttttgacgcacaccacttaacacaaactcgtgtttacaatattgtttataaggtatttcaaagtgttcagataaacgtgctttaatataattcgcattaagaaccgctgcttcagaaacctctttaagtccagttgctcccatagttcgaatatacgtataagctcttaagtaaataccaaagttaccataaaatggttttacacgtccgatagaatttttaatgtcattatcatatttaaatttgtcgccatctttaataaccattggctttggtaagtaacttgctagttcttttactacaccgactggacctgaaccaggaccgccaccaccatgtggaccagtaaatgttttatgcaagtttaaatgaacagcatcaaatcccatatctcctgggcgaactttgtccataatagcgtttaaattcgcaccatcataatataatagaccaccagcattatggacgatttcacggatttccataatatttttttcgaaaatacctaaagtgtttggattagttaacataatagctgctgtattttcatttacaacacgtttcaagtcatcaatatcaacttcgccacgttcgtttgattttacagtaactgatttaaatcctgcaaatgaagctgaggctggattcgtaccatgcgcagaatctggcacaatgacttcatcacgatgaccttcaccattattctcatggtaagctttaaatatcatcaatgcagtccattcaccatgtgcgccagcagctggttgtaatgtcacctcatccataccagtaatttcttttaattcttcttgcaaactataaataatttctaatgaaccttgaacttgatcttcatcttgtaatggatgtgattcactaaatcctggtattctagcaaccttttcattaattttagggttatacttcatcgtacatgaacccaatggataaaatccgttgtctacaccgaaatttttatttgaaagttcagtataatgacgtactaagtctagttcagcaacttcaggaaactccgctttgtttttacgaataaatttatcatctaacaatgactcaacagaatttgttttaatatcactttttggtaatgaatatgcatatctgccttcacgagatctttcaaaaattaatggacttgatttactagtcatttaactcaccagccttttctacaaatgtatcgatttcatcttttgttcttaattcagttacagctattaacatgtgatttttaaagtcgtctgaaacaacacctaaatcaaaaccaccgataatattgtacttcactaattcctcgttaacttgttgaattggtttgtcaaatttgactacaaactcattgaaagatgtaccatctaatacttcaaaaccttttttaataaattgctgtttagcatagttagcatgttctatattttgaactgcaatatcatagataccttgtttaccaagtgctgacattgcaattgatgacgctagagcatttaatgcttggttagaacaaatattagatgtcgctttatcacgtcgaatatgttgttcacgtgcttgtaatgttaatacaaagccacgattaccttcatcatcttgtgtttgaccgactaatctacctggcactttacgcattaactttttcgtcgttgcaaaatatccacaatgtggcccaccgaattgagcaggaattccgaatggctgagtatcacctacaacaatatctgcaccaaatgaacctggaggtgtaagtaatcccaatgctaatggatttgcatatacgataaataatgcttttttatcttcaataaagctatgaatcttttcaagatcttcaattgaaccgtagaagtttggatattgtactgcaacagctgctgtttcatcatccactgctgcttctaattttttcaaatctgtaacagtgccatctaaatcgatttccactacttcgaattccttacgcgtcttagcataagtatgaagtacttgtaatgcttgataatgtaaaccttttgagactacaattttatttttctttgtttgactaaatgctaagatacatgcttcagcaaagctagtcatcccatcatacatagaagaatttgctacatccatatctgttaattcacaaattaaagtttggaactcaaaaatggcttgtaattcaccttgagaaatttccggttgatatggcgtatatgctgtgtaaaattctgatcttgaaatcatagcatccacaactgatggcgcgtaatgatcataaacaccagcacccaaaaatgatgtatgcgtttctttagtgatattcttgcttgcaatgcgatttaatcttctaagtaacgttgtttccgcttcgccttcagcaatatttaaatctctatttaataaaatgtcacttggtacatcaccgaataattctcctatagattttgcaccaattgtttgtaacatttcttgcttgtctttttcagttaaaggtatataacgatgactcacaatgcacacccctttttaattatttatcaatttgatttttcttaacaattttcgcttttaattgacgcttacgaacttgaacaagcaactctctacccatttcaaactcatctctttttatcattgcaagtgcaattgattttcctgatgatggagactgtgttcctgaagttacttctccaataatatttccatctaaatccataacttcataaccagttcttgcaattcctttttcaagtaattctaatcccactgttcttcttggtgcaccattttctttttgatcttttaatacagatttaccaataaaatcagcatcaattaatggtttacttgcaaaagcgataccaccttcatatggtgtaattgattcagttaaatcttgtccatgtaatggcaatccagcctctaatcttaatgtatcacgagcgcctaacccacatggcataacattatactctaataaaccatcccaaattttttcagtatcatcgatattacaataaatttcaaacccatcttcacctgtgtaacctgactgagataaaatgacgtttgctccaaataatttgacaccctgtttaaattcaaacattttcatttcagttacatcttcatcaactaattgattaattaaatctctagcttttggtccttgtattgctaattgaccatattggtttgatacattttgtactttaacatcaaatttctctttgtgttttaaaatccaattaaaatctttttcagtattagcagcattaacaactaataaataattgtcgtcagctaatttatatattactaaatcatcaataataccgccttcttcattacataaagcagtatataatgcttttgaagtagttaaattatcagtatcatttgataataaatattgcacaaactgactagcatctttacctgttacttcaatttcacccatatgactaacatcaaacaggccaatttcgtatcgaacagcattatgctcctctttaatacttgaaaattgaacaggcatcgcccatcctccgaattccacaatttttgcacctctatcaacataattttgatataaaggtgtttgttttaaatcacttgacattgaaatacccccttaaaattataaaaacaggatagcaatcgctaccctgtttataaatcaccaattcaggaacgcgttacagtattatccttttgcctgagagtttcgtaataaattacttgcaccttcggcgatagagtcttaatactctattctctctaatactgatcactcgcttttattaaatttagcaattcataatatatttctgaaattgatagcaaatgactatcaaatttcttgaatgcgatttcattatatcttaaaatccgtgagcaatacaagtcatttaactgcgtgattgtcttattatttgcattaggtcgatgtgggtcatcattgattcgactatatataatatcaatattacaatctaaccaaataatgtttttttgatttttcaaaaaattaaatgcctcttcactttcaataataccaccaccagtagcaattatatctgcagtgttaatacattcttgcaaacatgtgaactctaaattcctgaaatattgttcaccatgtttactaaatatttctggtattgttaacttatacttttcttcgatatatgaatctatatcaataaatgataaattttgctcatctgcaacgtatttaccaatcgtagatttaccggtacccatgaaaccaattaaaattattggtgatttatcatgattcatgcgttttcccttctttcaataacaaaacaatcttatagttatagtcagtttctatattatataatgtctttaattttaaactatattgactgatataaaaagtgaaaatggaaaaataaattgctgttagcatcaataagaacggcgtaacatatcctttttctttatataaatcaaaattaataaattatttcacatcctttttaatagtactcatttaaatactagtaagttatacataaatagttttagtctgcacatttgtaccgactttaactgttatcgttattttaataatggatttatagtagatatttacagtaaatgctgtaacattattaatcattgttatatttcctctgtcatttacaactttaataattttattatttattaatttgtattcgatcatttcttcacctttatgtaaaatgatacgctgttgcctaatttcaatatcgtttctatctactcctttaaaatcctctagaatatctcttgagaaaaattcgaaatctacatttgttaattccctactttcaattagaaaagttttgctaagtctaattaagtctggaacaattagtaaagttatacttataaccatcatcgctactaacatttcaatgagcgaaaaagctttgacattaatactgtatacatgtcttttgataagaagtggtattttttgaaatagcacaaatttgttggtcactttgcttaatatcatacttccctatagttacccccttcttaagttcttctttattaattttagatacagtcgtcaaaattactttagaagcatcaattgtttgtagtttatggtttatactcgcttgcatttgattcatcattggtatcaatagtaatgtaatcaatccaattagcaaaaatccagccatactatctattaagaatgatcctttacacttatagcttttcataacgaattcttcctttttcaatatggaatattattctataaattgaattgttattgtcaattgttatactaccaaatttattgatattcccttttttatcaaaggcaataatatcaacttttgcaacattaattattttgcctacttttaattttagaaatcgtattttattattctctattactttaatagtgtcactgttttcataaaatctaacattgatatatccttgatttgctatagcttgcgacttaatataattcaattcagtaataaaagaaatgatatttgcctcatcatctattactctaagattgcttaatcctttagatgtcattgtcaaaagtagaaatatactgattaacatcattaccacaagcatctcaatcatagtaaatgctgactgctttctaatttgcaactgcttctccattactaattgttattgtctctcctgatttacatgtcttttgtgcttcttttataaaaccatctgcaattaagtcttcaatagacgatggatttctattatgtttcaatgcatacgcttcaatttgactattaaccatttttacctgtgcattacaacctgttgattgtatgtgagcagtttgtttagcaatatttggaatgattaaaattaataataaactgatgattaataacactaatagcatctctatcaatgtaaacgcttgagttttcttaagaaatttaaacatatattaacctccattattttatactttgcatcatttgaaacattggtaacataattactaaataaattgcgacaataaataaacctaaaatcaaaaataaaataggctgtaaaaactgagtctgttttatcgctttatcttctatttgttttactaatatttgcgaatataactttagttctacttctagcttccctctcttttcaccttgtagcacaaacttaattaattgaggcttaaagcattttagtttttctaaaatttgaggcaaaccatatcccatttctgaataagttaataagtatttacctagaaactgtctaaatggatcactactatggttaatataaacgtctactattgattgaagtgtaataccatttttataaaacaacactaattcattagttacaaaataagttttaaataattggaaatagcctgatattagcggtagtttcatcacaaagtttatcttattgagcatatttaaattgttataaattaatttcataataatagccaacatagatactattatgagcattactacaattatagtaggtaagctggtaatgaaaaaagacaatgttttttgaaaagaagatagttgaatattcatagaagtatataattgttgaaactgtggaattactgtgaggtttaatataataatcatagcaataaagatagaaactagtattaaggggtattgcagtgtctttaacaatcgttgttctgactttctattcactttcatataatttacggtttcttctagaacgtctataatattgccaaatctttctgccaaatatacttgcatgacgatagtatcgctataacctatcagtgataatatttgattgcatggtgcaccatttgaaatttcacttagaatggtggtacctaattgcttatttttatatgtcatttgaagatttaaaaattgaaaactttgatacagagtgaaaccatatttcaacaaattacataaatttgaaagtaagtcgatttgttgggccttacttaattgtcgcttcttagaatgtagtttaaatgtatttatccattgtagtttcacaaatgacacctgcttttgtcatatcatcaagtttatcttctaagttcttaaatgatgatggtaatgaatgattatgggaaaagaaatatcggagttgttgctgagatagaatttcacatactaattgtcgctgttgcttaatagtagttacaagtcgttggtttataattaagttagttgcctgtatcaattcttgtacagaaatgcccatttctaatagccttaaaatagcacctttacaatcagttgcatgcaatgtagtcagaacaaggtgaccacttaaactagcctgtataacacacttggcaacatctttatctctgatttcacctattaaaataacatcaggatcacatcttaaaatagctttaaacgaatttacatagttaatgccagctttatcattcacattaatttggacgataccaggaatttgcatctctacaggatcctctatagaaattacatttaaattcaaggctttattcgcgtatgagaccatttgatacattaatgtactctttcctgaaccagttggcccactaaacaatagtaatccttgtttcttattcatgaggtgtttaaaatcattgaatttataagttgatttctgttgttgaaaaaattgaggtacaattctgataacacaactttcttggccaagtgacaatggtaaagttgatattctcaaaaaatatattttattgaaatggtaactatatcgaccgctctgtgcgacttgctgtgtagaaacatcaagcccagcttgaaacttcatataaactaataacttttgataaatgctattcccaatttgttcatactgctccaagttatcattaattctaaatttaatacttacttcatttttaactggaataaaatgtacatcactcgctttcatttctatcgctttattaattatttcttgaaatagaatcttcaaaaaaacacctcctacatataatcacgtaggaggtgtttttattacttcaatttaaccgtgtaaaaatggatttaattgttcatcatcaaccgtcgtatatggaccatgtccagggaataaaggtaaatcgccttctaattcaaatattttatcttgaatagaatcaactagcgtttcataatcacctttatataaatctgtacgtccgattccattattaaataatgtatctccaacaactgcgaattcatcgaacacatatgttaaacttcctggtgaatgtccaggtgtgtgtaacacattaaacttaaatccttctatttctgtgctaccttcgtttaacttttcaggagttaccttacttgtaataattggtaatccatattgcttaaatttatctgccccatttttaacgggatcttttagaaaatcaaactctgcttcatgcatataaaccgggacatcgaatcgatcaactatatcatcgactgctccgatatgatcaaagtgtgcatgtgttaataaaatagcttttaacggtttatttatttggtttaattttttaataattttttcactttcacctgaagggtcaatcagaataacagctttgtcattttcgatgaaatacgtattagtatcaactaagcctaaagttaagcttgaaatcctcataggttttcaccactattttctaaatgtttttgtactgatgttagtttatcattcatttttctagatttgtctcgtcggtcatcaatacggatatttgtacaaactctacttaaacctttatcaaaaggtaattcatgtatcacttgcacaacttctaatacatcgcttaattcaccttcaattagagtattcattggtgttaattgaaaatcaattttacccattgctttatattcttgaagttttttctgaatatctgcaatatatttactaacactcggaccttccgttccaactggaataacaaccacatcaacaatagccattattttaccccctctttatctaatacataggtcttgattaatcctgctgctcctgtaatacctgcatcattacctaatttcgcttgtacaatttcagtttcaaattgagcaggtgcaaatgttaaattatgatattctgttttaatattttcaattaaaataggtcctgcagtagacattcctccacctagaacgatatatttcggattacttgtaatactaataatactacataaatatccaatatagtttgcaaccttttcagtaatgaaaatacagaattggtcaccagcttttgccgcatcaaaaacagcttttgctgtaaccttattttctttaatcaattctaatatagaagatctaaacgtcaacttcggatagtagaagttaactaagttaacaacgcctgtcgctgaagcaactgtttcaatacatccagaacgaccacaattacatttaaatcgttgatcgaagtctgctctaaaatgacctatttctgcgccagagccattatgaccatgtacgatttcaccatttgaaataattcctccacctagacctgtaccaagtgtgatggcaacaacatcatcggcaccttcaccagcacctttgtgtttctcccctaaagcagctatgttagcatcattatctacatacactggacaatcaacgaattgttcaaaaatctcacgtacattaactttttctggccaatataagtttactgctccatttactgtacctttttcaaagtcaacaggacctggtacaccaatacctacgccaagtacatttgaaaaattataattattttcatttactttttcaacaaacgaatcataaattcctttcaaaagtgtatatcctgtactatcagatgtatcagtgtgaatagaccatttatgtaattgttctaattcaggtgtgaaaatacctaatttacaagtcgtcccgcctacatcagctgctaaaataatttttgtcatttctgttcattccttctctgattaattatcaacgtacatttcaaatattcttccttagataacagttcatattgatacaatgatgaaatctcctgttgaatcatttcgtacatatcttctggatttttaaaatatattagaaatccgtaacttttcaataactgttgtacatcataaaagttatttatttttcgactcatttgatttagtcaactctttttctaagttaatataatctgtatttttagggtctgcatttaatgctttacgcacatattttaatgctttttcatcatcatttaatgaacgatttgctatcgctaactcaaaatttaataaacctgatttaggaaacattctaagtcctcgctcccattctgtcataccttcagacttagaattgatagtagccataatcataccacttaaataatatgtttgatcatcggcataatttttatttattgtctgcttcacaatattttgagcattatcataattaccactagtcatatcatctttgatcaatttattataaatattatcttctttaattgtaaaaattctaatttgaagtgcaataaatataacaagcataccaattagtaaaatccaaaaaatattacgattcactttatagtaatagccaattaaagttattaataaaccaccaatgaatcctccaatatgcgccacaatatttatatttgacataaacagagaaacaccaactaatatcactaatgcaattaataactgtcccaacatttttttgttaaatgtttttgaaacatacatcatcgcaaaaattgatccaatcagaccaaatatagcaccactagccccaactgaaattgtagtcgtattaaatgatagtgatacaaagtttccaaacaaccctgcaataaagtatacagttaacatccgccatgaaccaataattgcttcgactattttaccaaaaataaataatgaaagcatattcataagtatatgttcaaaactaaaatgtaaaaacatcgatgtaacaattcgataccattcaccatgtacgacattaaaatgcactaacccgccaacatctaataattttacatccgaaaaattatttaaatataaaatcatacataaccatattaagacatttacaaatattattgtgtatgttgccggtgaaaatttctgcatatatttatctaaaaagttatcggttaatactttgcgtttatagaacatatatgtctttttatcattatcttctgaaataagtctagccaaaaatatattcggcatatgctttatcaaatcttttgtgtgtcttataacattgaatttaattctaattggcgaaacttcatttaattgttcttctgaaaattccgattctgtaaaataataaaattcaaaactttgtggttcgaaagaaataaaatttgctatttcatctttgtgttcaagcactttcgctttgtcaaaacgtatttcttgggtagacttgatatgttgtttaaaaatgactacttgtttttttcttttatgggctaaccaaatttcttggtcatctttttccctactgacaatatcaaaattcaagtacctaatccaataatatattgttttccaaaattgtttgtctatgttcatttagtcctccactatgctgattgatatataatcaatttatcgactggttgatcgaatgattccggttcaaatgatgttatttgaaaatcgtataataagcttattgtctttgtctgataattagctaaaaacctgtcgtaatagccaccaccatacccaattctatatccatcgtcttgaaatccaacaccaggaacaacaattaaatctaggttattcgttgtttcaccttttgaagttggatagtaaatccccttattatcgacatcaatatctttgagattaaatatttctttaaaagtcatttgatgatttaaataatccattttcggtacaaaaatacgtttatgatccattaaggcttgttcaataatagaaaaagtatctacttcatgattaaaagaaagaactagcgcaattgcgtttgcttctttgtattcttcagttgcaaaaaattgatttcttaaccatgtgtctgcttttcgcttttcagctttattaaaattcttcattttatgtaaaatgtattttctaatctcatttttagtcacattatcacccactttattcaattctattatatcgttaataacaatacatgtcattatgttgtcatgatgaattatgcgacaattctaaaatttattatttcaattgaaattcttttatcatttcatacgtgtgcataattaaaaaggtgaaacctcttattttgagatttcaccttttttattgttaatttaaatttaattttaatgattattttgtttcacggtgtaaagtttgtttgttttcacgtgaacagaatttcttcatttcaacacgttctggattatttcttttgttcttagttgtaatgtagtttctgtcaccacattccgtacaagctaaagttacgtttacgcgcatggttattcctccttatcatttctaaatacgactttattattataccaacatctataatatttgcaaagttaaaattttacaaccatgcgctacacaatcgtcaggttaaattttatttgtctttgtctttatttttatcatctttacctaactgcttaaagtagtagttaattacatctctacctaagtctccacctgttaaccatggtggtggtacaggctgatttgtatatacaattgaaaacgctaattttggatcatcaattggcgcgtatcctatataagtagagttaactcttggctctccgttttggaacacttcagcggtacccgttttaccagcagtaggtactactgtatctttaaaactaacatatccagtaccatctttatcattaaatgccattttgaatccttcttgaatttgtttgatttccttttcagtattattaaccttgttcaagacagtgccattaattttcttcttgagtggaccaacctcatctttattagttgattcatgaatcgttaatccaatgtgtggctgtattctataaccatcattcgctatagttgaaacatattgtgataattgtaatggtgtataggtatcatattgaccaattgataaatctagataattacctggattatttgttaatggttcgatttgacctcttgtttcatttggtaaatctatccctgttttcacacctaagcctacttgatttaatcctcttctaagcttttgggcaggtgaacttatatctgaaggtaaagccataccagaataataagggtctcccgctaattttaatgctgttttaaacatatatacgtttgatgaatgcatcaaagcttgcttatcattaatagatacatgcccgtttttattgaagtatgatcgttttgtcaaaccaccttggaaatgtaatggttcatcgaccattgtttctccaactttgatagctttattctgataaccagctaataatgttccaccttttacagaagatccaaccgcaaattgagaagtaaacgtaccaatgtcataatcagtcattttaccactcttattaatctgctttccggcaagcgcaagaatgtctccatttttaggattttgtacaaccatcatagcattatccatatcttttgcaccttggctgcgaagcttcttaatttgtttatctaataatgcttctacttctttttgaagatctatatcgatcgttaatttcaaatcttgaccgcgagcgccaggatttaacacttctgaagatgtaactttaccagatttgtccgttgtgtatttcatttctttcttcttaccacgcaatacatcttcatattgatattctaggtaagattttccaacacgatcattgcgtgaatatcctttggataagtaatgttctgtcaattcttttggaataccttcagcaggtgtcgatacatctccgaatatacctcttaaagtatcgccatatggatattttctatcccaatccatagacgtgttaacacctggtaatttggaaagttgctgagaaactgctgcatactctttttcactgacatcttcattttttatcatttgtggatctaaaactgttcctgcattcatctctcgaaaaatagctaaaacttgtaaatctttagaagacaattcatctaattgtgattttccgattttcgataacagttgtttatcatattgatcttgtttaatacttccatctgctaacatagcttgttcttttgtcatcattgcttttgcttttttaggatgcaactgaatccagaaatctttcttatcacgttctgtaattttcttagtatccatcttgattagctttgataacttttcagccgtatccaacatttccgattgtgttgtttttcgacccctagtatatgtaatagccattttagaagcattatcaactaaaactttcccatttctgtctaaaatacgacctcttggcacagactcattcactgtaatgttttcatcattttttataatttgtttataatgtgagccttgtgcgatttgtaaataacctaaacgtagtactagtactgcaaaaataaatacaatcacaccaaatataaagttaattctcttgttaattgtattttgaacgatttcatcatttgatttttcttttagtctttttaacaaaactacctacctctattcaaagtctttcactttaaatcatatatgaatttagaaattatttctatctttttgacaaaaaaataacggtctcatttaagagaccgaacaagtaatcatactttattttgttgcattatataattcgtcaactttttcccagttaactacattccaaaatgcgccaatgtagtcagggcgtttgttttgatattttaggtaataagcgtgttcccatacgtctaaacctaaaataggtgttttaccctcagttaatggattatcttggtttggtgtagtcacaatttctaactggccattgtttacgactaaccaagcccaacctgaaccaaagcgtgcagctgctttgtcagcaaattcttttttaaattcttctaaagaaccccattgttctttaattttttctactacagtacctttttcttctgagtttggtgaaagtaactcccagaataatgaatggtttaaatgtccaccgccattattacgtacagcagtttggatgttagctggtacactgtctaaattagcaacaatttcttcaatagatttagattctaaatctgtaccttctactgcagcatttaatttcgtaacatacgtgttatgatgtctgtcatggtgaatttccatagtttctttgtcaaaatgtggttctaatgcatcaaatgcgtatggtaattttggtaattcaaaagccataaataatcatcctcctaaaatgtctgtaagtaaataataacaagcagtgactggttcaacaaagaatttgcttaaattctactacttattattttctctactcatttaatataactcaaatcaaaaataattaaacattttgtatataaaaagttaacagatttgccataaaatcatacgaacggagtatgaaatgaacctttatcttctataatttaaaaaatgagatttatgcatacatctgaccaaatgtgcataaatctcatttctttatattaatcttggcaagactcacatacaccataaacttcaagtttgtgtttgtgaatattaacaccaggtagtgataactttatctgatctattggacaataatctattacctttgtatctccacacttttcacagataaaatgatgatgatgatggtttgtacaagcgattctaaacttcatttcaccatcaagttctgtattttcaataatccctaaatctttaaataagtgcaggtttctatatattgtgtcgaatgaaattccaggataattttcatccataacttgttgtatatactttgcgtttatatacttatcttcttcgacaaaaatatctaacatatctttacgtttatctgtatattttaaaccgttctcttttaaaattttaatagcatcatttgtattcattgatattagctccctttttaaacttcattcgcattttctgataagccattgtaatcataagtaaaataactagtagaactacaattacaccacccggagaaatgtccatatagaaagctaggactaagcctaatattactgataattcacctaaaaatacacttagtaatatcaattgcttaaaactttttgttattcgcatacttattgcaattggtaacgtgattaaagcacttactaacagtatccctacaacacgcattgaggcagaaataaccatcgctacaataacaataaataaaaattgaatccatttaggaatgccaatgactttactatattcctcatcaaatgacaatataaataattctttataaaacaatgtaataaacagaacaactatgatggcaatgacaataatcgttgttaaatcacttatattcactgcgcttattgagccaaatagcaatccaacaatttcttgattgaacccatcagctaatgaaatgaagattgcactcaaggcgataccagcactcattataattggaatagcaatttcttggtaagcagtgtatgacgttcttaatttttcaattagaagcgcacctactattgcgaataagattccaaaccacattggattaataaatactagtgttggcataatagtaagtaaaaacataccgaaggatataccacctaaagttacatgacttagagcatcagctataagtgatagtcgtctaacaacgataaaagcaccgattagaggcgcaataaaacctatcaagataccactaattaaagagtacctcataaaatcaaaattcaataatgcatctatcaattgtgacacgcctttccattttaaataaactcaaatctttattaattacaacattctcgattatgctgatgatcgacaaaacgtacaggatgtccataaatttttgaaatttcaacttcatcaagtgatttaaactcatcagttgtaccatggaaatgcaaatgcttatttaaacatgctacttcagtagcagtatctgctacaacaccgatatcatgagtaactaagataatggtgataccttcttgttttaattgatctaaagtattataaaattcacttacatgttttgcatcaataccattcgttggttcatcaagtactaatactgcaggttctgaaatcaatgctcgggcaatcattacacgttgttgttgaccacctgataattctgctatatttttatgaattaaatcacttatattcagtctttctagtactttaatcactttttcattatctttgctattaaatgtttggaaaagacgttttgtctttgttaatccgcttaaaacaacttctttaacacttgctgggaaacctgaattaaaggcatttgctttttgtgatacatagcttaatttaattgatgttttcttatttttaaaatcaataccttcaacaaaaatctcaccactttgtaaaggtaataaccctagaatcaacttcaataatgttgatttaccagcaccatttggtccaacaatcgctaaaaattcacctttatttattttaatgtttatattttctaacacttttttatgatcatagtagtaattgacatttttcaattcaaagactggtgtcatcgtattctcacctcgcattcaactatacaactcctagtaacatatgtaaacagtaatgtttacgactcaaaattagacaaaataaagagatatgcccccttcaagttttatttatcgcatttcttgaagagagcattatcattttattgttgcataaccttattttttaattctgggtcaaattgctgttgttttaacatttcaatttcaagtttatatggcggttttttatttttcttatcttcaccaacataaggtgtttctaagattttcggaatatctttaaaactatcatgatgcacaatgtaatttaatgcatcaaaaccaatgtaaccgaagccaatattttcatgtcggtctttttgagcgccacggtcatttttagaatcattgacatgaacaactttgattctgtcgactccaataattttatcaaattcatttaatacgccatcaaagtcctctttcacattatatccagcatcatgcgtatgacatgtatcaaaacatactgataaacgttcgttattatgaactccatcaataatacgtgctaactcttcaaatgagcgaccaatctctgtacctttacctgccatcgtttcaagcgcaatacgtacattattgtcattcgttaaaacttcatttaatccttcaataatcttattaattccggcatcaacaccagctccaacatgcgcacctggatgtaatacaatatctttagcccctatagcttgcgttctttcaatttcttgttgcaagaaatctacaccaagattaaacgtttctggtttggttgtatttgcaatattaatgatgtatggtgcatgaacaacaatattagataagccatatttttccatcacttcatgacctttagttatatttaaatcttcaatacttttacggcgcgtgttttgaggtgcaccagtataaatcataaatgtcgtttcaccatattcatgcgcttctatagcagaaccttctaacatctttttaccactcattgaaacatgtgatcctaataacataaaacacacctaaccttttttgttttgcttacgtttttgtctattttgctgcttactaaattgcttacgctcttgacgtttcattttttcaacttcttgtttaaatttcttcttataacctggtttaactttgtttttaattttacttcgaactttgttcttcacttgattagttaaatggtcatctttgcgcattcttgcttgacgctgattgtgcgctttaacttcttttaactcaccatctttaatatcaacagtattgaatacaaaaccgcgatcttctattaatgaaatattgtgttcttcatcaggactataaagcgtaattgctacacctttataattcccacgaccagttcgtccgactctatgcgtaaagaagtcaatatcatttggcacatcaaaattgatgacatgactaacaccttcaatatcaataccacgagatgctaaatcgctggcaataacgtattggaattctaaattacgtatacgtttcatttgttgtttacgttcacgtggcgttaagccaccatgaatcataccaactttaataccagcttcatttagtgaacgtgctaaatcatttgcattatctctactattacagaaaataatacataagtatggatttagtatatcaattaaatttaaagtcttttcaactttagctgcacctttagtaggtattaaatagaattcgatgttctttttattttgttttttactgtcgacagctacatattctggatgacttaaatatttatttaaaaatggttgtaactgttgtgggattgtagcactaaacaccgcaatatttgcattatcttccaatcttgcagcaatgtaatctacatcttcaattaatcctaagtcaatcataagatccgcttcatcaataactaaatatgatgctaagtgcacatgtaaatgtcccgttttagctaagtcattaattctagtaggggtgcctataatcaattgtggttgtgcattacaacgttgtctatctttctctatatctgtaccaccaataaaaactttaactgaaacaccagctttaaattggcttaaatggttcgctgcatcgtatagttgttgtgcaagttctcttgttggtgcaactacgattgcttgtggttcttttatttcactatcaattaactgcattaatggtaataaaaatgcatgagatttccctgtacccgtttgagattgaccaattaaatttgttctctttagtattcttggaataattcgattctgaatttcagttggtttttcaaaattaaggtctttcacagcgtcaattaaactagattctagattaaattgttcgaatggatgttttgccatgatttggcctccttatatgttcatctttactattataaagtataaatgtgctattttaaataaaaatattaaaacctcgaaatttcaaaatttagaaatcccgagattttagtttaaatatattgaaatggatctgtattaattgtagatgcttcaacatctatatttattttttctgtattgaaccaattcattagtaacgtttttaaaccttctttcatcacatattcgctgtaatgattaatatcaattaaattcacaccatgaattttagcatctaaggcatcatgatgtttaatatcacctgtaacaaagacatctgcgccttgttggacagcttgatattcatatccaatacctgaaccaccaataattgcaatacgtttaattttctgattagactcaccaacaaaacggacacttgggatatttaatttagatttaatatcagctgcgaaatcttccaatgtcatttgattatccacttctgccataacgccaagtccataaagggatgtttgttttatctcaataaaatcaaataccggtgtttcatatggatggtattgtttaattaattgctcagcccttgacttttgatatgcatctatcataaattcaattttaacttcatctacatattcaattttatcaatttgtcctattgttggattagcttcaccaactggtttgaattgccctcttccttcactttcaaagaaacaatattcataattaccttcttgcgctaatccattttcactaagcttatctttaaatggtccaacattatccttaggtatatatgtttgaactttatagtatacatcttgttgattatttattattgaaatgttcttcaaacccatcgccttcgccaacatcatattgacaccatacggatttacatctaaatttgtatgcatcgctattaaattaatgtcatgttgaattagttttctaatgatcaaaccataaccattagcttttaatgatgttacgcctttaaagattagaggatgatgactaataatagtattataacctttttcgattgcttcatttactacttccaacgtacagtctaatgctgttaaaacaccagtaacttcaacatcttcatcacctattaacaatcctacattatcccaagattcagcagtactaaatggcacatgatgatctaacaatgtcattaaatcagctattttcattactataacaccctttcaattacagcaatttcgtcattaatttgagctaaacgttgatgatgttgttcagtattgagtttcgatttaatatgataaagtgcttctaactctctttgccatttttttataaaatattcatttttgttgttcagcaattttggtccgaatttcaattcatcagatgatagctctattaattgtgtagaatattctgctacaacaatttcataaatatggcctttttcttccattattatttcatcaattatttcataattcaattgttgtaatgtttgtcttaaattttcagtttgtatattactttgtaaaatcaaccttggatgttgacttaacttatcttgcccatcttttaaaattttagcaataagtggtccgcccataccacaaattgtgatattatcgattacgtcctcaggatgaataacacttaagccatcccctaaacgtacatcaattctatctactaattggtttgcagctacatttttcacagcagcttgaaaagggccttgaataacttctccagcaataccgcattcgcataaatggttttgaattgcatagattggcaaataagcatgatctgagccaatatccgcgattgtaccttgttttaaaaatcgacttaccgtcgttaatcggttatttaacgaaatcattttattctcctttatgaaaaaagaggttgaacattattcaatgtaccaacctcactcaagttaaatcttaatctaaaaataaataagcgcttattcatgtcttggtatcaatcattaaaattgatataaattaatccataaagtctttcaaacgtttactacgacttggatgtcttaattttctaagtgcttttgcttcgatttgtcgaatacgttcacgtgtaacaccgaaaactttaccaacttcttcaagtgttcttgttctgccgtcatcaagaccaaatcttaatcgtaatacattttcttctctatcagttaatgtatcaagcacatcttctaattgctcttttaataattcataagctgcatgatctgaaggactttgtgcttcctgatcctcaataaagtctcctaaatgactatcatcttcttcaccaattggtgtttctaatgaaacaggttcttgcgcaatttttaaaatttcacgaactttttctgctggtaaatccatttcttcaccaatttcttctggtgctggatctcgacctaagtcctgtaataattgacgttgaacacgaattaatttattaattgtttctaccatatgcacagggatacgaatcgtacgtgcttggtcagcaattgcacgagtgattgcttgtctaatccaccatgttgcatatgttgaaaacttaaatcctttgttaaagtcaaatttttcaacagctttaataagacccatattaccttcttggattaaatcaaggaataacataccacgacctacgtatcttttagcaatacttacaactaaacgtaagttcgcttctgcaagtcttgattttgctacttcatcaccttgttcaatacgtttggctaattcgatttcttcttgtgcacttaataagttaacacgcccaatttctttaaggtacatacgaactgggtcatttattttaacacctggaggggcactaagatcacttggattcagtttctcgtcagtatctgaactatctttttcattaactagtgaaatatcattatcatttaattgatcaaagaaatcatccatttgatcagagtcgatatcaaaattctgaagtttttcagcaatttcttcatgacttaaatgaccctcttttttacctttttcaattaattgcttcttaacatcttctaatgttaatgtcggatcaattgtttgttttttaattttaactgtgttatcagacatgaaacggcctcccgattttaaatatgaacattcgaaatttattcaatattgctattttaaactaaattcttaattaattcatccatatttttaattttattttacaaattggaactaatcccaatatttatttttcaatagtgttgtttaaatgcggtaactatcatttacccttatacattttgacataatcattattcgtattattctttaaaatcacatgctacatgcgttctttattcttagcaacaatttgctgtaaatagtatttttgtaattctacatcgccaatccttgtagcttcccttaatttatgattcaatgactcaattgtttcttgtcctttttcattaataacattgacataatcatcaatttcattttcatatggttcgtcattcaaattatattgttctaagctaattagtgtttctctcaactcatttgaattaacatactgtacagcatcactgatattatattgatcattttccgcataaaaatcatgtaagacttcgaatacatatttaaaatgctgatttgtgaagttatccttatcaacactttcataatagtttaaaaatgtatctttatctctcattaaatgttttaaaaatgctcgctccgctttttcttgacggctcaaattgtcaaattgtgccataccaattggctcaggttcaatataaccgccatactcatcataaccgccatactcatcttctggataataattggctggtgcttgattgaattgtatttcgttagctaactgctcaggactgacattgaaaaatggcgcaacatcatttatagccttttgttgcagaattgatgacttcataagtgaaatgtcatgactcagttctttcaaataacgttcatatgaaaggtcattatgtgcaatttcatcttttaatatacttactttataatgtgcaaatgactttttgtcattttttacaaaagtagtaaatgcgtcgttgccatacttaccaatgtattcatccggatccatgccagatggcaattgtataacaaatacatttagcccttgctgtaacaaatgttgacctgttttaagtgttgcttcactacccgcaaaatccccatcaaacattaatgttatatttgatgttaactttcgtataaaggtaatatgttcatctgacaactgtgtacccattgttgcaacaacgtttttcaagccagcagtatcagattttataacatccataaaaccttctagtaatacaatttcatctaattttctaattgatttacgtgctttatctaagttatataacaactttcttttttgaaagataggcgtttcaggactatttaggtattttggttcttgaccggtatatgttcgacctgaatatccaacaattcttccttgcgcatttttcaaaggaaacataatacgatttcgaaatctatcgtaataactgaaattttcttcgttacgtgataataatccggcttcatatgctaattcaatatcgtaaccctttttttgaagaaaatcatgacaaaaatgtgagctatcgggtgcaaagccaatgcctcgctctttaataagcgcatctgtaaaaccacgttcttgtaagtatgttaatgcttgttcgccttcgactgtctttgttaaagcgtaataataaaattcttgtattaactcatgcatttcaatcatttgtaaatcatcagaagcaatttgaacatttgagttagattgtgttgcctcaatatctacagcaacattaactctatcacctaattctttaaccgcttcaacaaatgatatgtctttaatttcttgagtaaattgaaaaacattgccaccttttttacaaccaaaacaatgacaaatttgtttatcttcagaaactgtaaatgaaggtgtcttttcatcatgaaaaggacacaaacctatataattgcgtcctctcttttctaattttacatattcacttaccaagtctaaaatgtcggttttatcttttatttcattaatgatcgattgatctattcgcaaattaaatcacctattaagcattagttatactattatacctaattttcgacaaaaatgaaatcatttcgatttattttgttcaatataatggattatatcgtttgctgtttcttcgattgctttttgagaaacatcaatgacaggacatccaatttcacttacgatttcttcaaagtaattcaattcttcttgaattcgtgcttctgttgcatatcgagctgtgtcacctagtcctaattgttttagtcgctcttttctaatgcgatttaatttttcttcacttattttaagtgcgatacatttctttggatcaatatcatataagccatctggcggtgtcacttctggtacaatcggtacattcataactttgtaactcttatgcgctaaatactgagataatggtgtctttgaagttctcgaaataccaagtaaaacaatatcagctttaggtaatcctttaggatctttaccatcatcatatttaactgcaaactctatcgcatcaattttcttgaaatatgcatcatctaatctatgaacgatacctggctcattataaggtttttcttcaaccgaagctgataataaatccattaatggccccatgatatcgacagacttcaattggaattctgctactttctcactcatatattgcttcatttcaggtttaataagtgtataaacaatgatagcatttgtatcttttgcaacttgaatcacttcatcaacatcttcaaaagattcaatatatggatatcttaataattcatttttacattgcttaggattgaattgtgaaatacctgccctagcaactaactctgccgtttcacctatagaatctgaagctacgataattttaattttttccattacttctcacctattctttatataatgctactaataacttagctattgttgttttggaaattcttccaattacttcatacttttgattatctttttttcttacaattggaatcgaatcaatttctttttcaatcattctatctgctgcgtatatgactaattcgctttcctctaaataagtgacattaggcatacgtgtcatatttacactgataggtactgtatgaatatctgctccaatcattgaagctcttaataaatcttttcttgaacacacaccaacaaaatcgttatcttcattaataataaataatgtacttacatcttctaaaaaaattgtacaaatagcgtcataaactgttgtattctctcttagcacaacaggttgagacatatagtccttaacctcaaattgtcgaagtttttcattaaaaaatttaccttttgatttacctgaataataatatccaactcggggacgcgcttctaaaaaacctgacattgttaatatcgctaaatctggtctaagcgttgctcttgttaaattcaacttatctgctatttgttcaccagtaatgggtcctttagttttaacaatttcgatgattcgttcttgtctttgactgagttctataggtcttcaccccttttttattcacttattattataccgatatttctttcatgtcacaaacacattaattttacttgcctttaaataatctatcaattagaataaacgtacagcgagttaaggatagtgtaagcttaacaataagattggcgcaacgaatcattttaaaataaaagcgagtgactacactaatttgggtggaaccgcgggttaaatacgtaacttattttgtattatatacaatttaaaatattaactcgtcccatggaagtaaagcatatttactatgctgttattttccatggggcgttttcatgtatgaggagaggtaattatggcaaaagatatggatacaattgtttcattagcaaagcacagaggttttgtgttccctggtagtgatatttacggtggtttatcaaacacatgggattatggtcctttaggtgttgaattaaagaataatgttaaaaaagcttggtggcaaaaattcattacacaatcaccgtttaacgttggtatcgatgctgcaatcttaatgaatccaaaagtatgggaagcttcaggacacttaaacaacttcaacgacccaatgattgataataaagatagtaaaattcgatatcgcgctgataaattaattgaagattatatgcaagatgttaaaggtgatgaaaacttcattgccgatggtttaagttttgaacaaatgaaaaaaattattgacgatgaaggtattgtttgtcctgtaagtaaaactgctaactggactgaaattcgccaattcaatttaatgtttaaaacattccaaggtgtaactgaagattctacaaatgaaattttcttacgtcctgaaacagcacaaggtatttttgtaaactataaaaacgtgcaacgttcaatgcgtaaaaaattaccatttggtatcggtcaaattggtaaatcattccgtaatgaaatcactccaggtaacttcattttcagaacaagagaatttgaacaaatggaacttgaattcttctgtaaacctggtgaagaaatcgaatggcaaaattattggaaaacttttgcaagtgactggttaacaagcttaaatatgagcagtgaaaatatgcgtttacgtgatcatgatgaagatgaattatctcattactcaaatgcaacaactgatattgaatataaattcccatttggttggggtgagttatggggtatcgcaagtcgtacagacttcgacttacgtaaacatgctgaacactctggtgaagatttcagataccatgatccagaaacgaacgaaaaatatattccatattgtatcgagccatcacttggtgcagatcgtgtaacattagctttcttatgtgatgcatatgatgaagaaggcgttgaaggtagtaaagatgcacgtacagttttacacttccatcctgcattagcaccatataaagcagcgattttacctttaagtaagaaattatctggcgaagcgattaagatttttgagcaattaagttctaaattctcaatcgatttcgatgaatcacaatctatcggtaaaagataccgtcgtcaagatgaaatcggtacaccttattgtgtaacattcgactttgattcattagaagataatcaagttacagtacgtgacagagattcaatggaacaagttcgtatgccaatctcagagttagaagctttcttaactgaaaaaacaaaattctaattaaaaagactctccaccatatgtggtggctatataatttataaaaagagatactggttagtaaaattgccagtatctcttttctattcgaaaaaggtattcaaataaacacatctatgtggctacttgaataccttttattattttatgttattgttccaatctttttaattggttgattagtttctgacttttaaaaaacatacctgcatattcacgatataacattaaaatgatatctgacatttcatcaataatttcttgatggatattcaatgaattcattttatctattggtaatttttgtaatacatctaataaatatagtgttttattcgataatataactgcatgtacatctttagaagcctcttgccttgaaatcgcaccgtcaaacttaaaactataacctattaaatctgcttgtgtgtcattaccactcacagcacagcgattaaatgatgcagtaaaaccaaatcgtttcatacactttaacataactacgactgacattaactgtgcagatgtacctgattctattttttcaagaacaaattgtaataattgatagttatatggtgcaatgtcaccttcatccattgagcgctcaatagtttcagctgccagagaggcataactgcttacgtaaaggtccatttgtaatttataatgttgactaataacatctacagaatttaacgttcccatacctcgccactgattgtaaataaacaaaccataaacaaacaattgcgtttgcgcttgtaaacccgtcttaacttttttagcacgccttgccataagtggtacttttgcaccatgctcatttaaaatcgtgataattttatcagattcaccataatcaactgctttgatgataatccctttttggcgcattaacaattatcttcaccacttttaagattaatcttggtcttcaacataaccaatttggcgaataaagttaactttgtttcgccagtctctttgaactttgacccataattctaagtaaactttagagcctagaagcatttctatatcacgtctcgcacgttttcctacttcttttaactttttaccgccttttccaatgacaattcctttttgcgaatctctttcaacatatatagttgcttcgatatgaacacgatcttcgctttctttaaccatacggtccacattaacaccaatcgcatgagggatttcttcacttgtaagatgaaggattttttcacgaatgatttcacccactacaaattgttcaggatggtctgaaatttgatcatctggataatatttaggtccttcgggtaaatacgtctttaaaacatcaataaaatgatcgacatttagcccttctaatgctgaaataggtacaatctctgtaaagtccatataactttgatattcttcaatctttggcattaattcatctggatgcactaaatctattttatttaatactaaaaatactggtgtcttaacatttttcaacatttctataatatattcatcgcctcgtccaatttcctcattggcattaaccataaacatgattgcatctatctcagataatgtatttttagcgactttcatcatatagtcacctaatttgtgtttaggtttatgaatacctggcgtatcaatgaatataatttgcgcgtcatctcttgtcataacaccttgaattttatttctagttgtttgagctttatcggacatgattgctattttatggccgatcactctattaacaaatgttgactttcctacatttggtctacctataattgaaacaaatcctgatttatgttctgtcatttattctaaatcctttcctgaaaatccaaatggtagtaactctgcgactgtcatcataaccatatctcctttatgatttgtcatatacacaggcatatcatcatcacataattccttcaaaacttgacgacatgcaccacaaggtgatgacggtttatctgcatctacggttacagttattgattcaaaatcacctggtctgtatccttgagaaattgccgataccaaactagctcgttcagcacatatcgataatggataagaagcattttctacattggtaccataaaaagttctaccgtctttcgtttttaaataagcccctactttaaattgactgtatggcgaatatgattcttgttgtgcttttctaacttcttgaaaataatgaggttgataactcatatatgcctccctaaaataacgctataaaatgtggtaaaaatactattaaacctataataaatgctaatattgaaactataagtacactaaaagccgcaatatctttagcgtatttagctaaatcatgatattcaacggtcactaaatcgacaacatattcaatagcagtgtttaaagcttcaacagtgagaactaatgcaatagcaatgagtataaatatccactcaatccgattaatatttagtacgagaccaaagacaatagcaacaatcattgcaaacacatgtaaaagaaatttatagtctttttgaattaagattttcagcccatcaagtgcatatttaaaccttttcataattagtctcgtgttaatccatatgcgtttaatattgtatcttgtcgaccaaacatttccttttcatccgcttcagtcatatgatcataacctaatagatgcaaaaatccatgtaatgctaaaaatcctaattctcgttcaaaagaatgtccgtaattgtttgcttgttcttgcgctacatccgtacagataattatatcccctaaaacacgtggtatatcaagaccactaaaatcaatctctggctcatcttcttctaaagcaaatgagattacatctgtaactttatctttatctctatatgttcgattaatttcttgtatttcttgtttatctacaaatgtaacagaaagctcagcatcgtcttctatatgctcttcttttttagcaaattctaataaatcttcaatttgtttataccaagcatctttaactaagcctgtgtgatcgctaaaatctatcgtaaacatttaattctctccttcataatgttcaatgatcttacttaccaatggatgtcttactacatcgctctgatctaatttcaatatacttatacctttaacgttgtgtaacctactgaccgcttccttaagtccacttttaacacctttaggtaaatcgatttgagtttggtcaccagtaactaccatttttgagccaaaacctagtcttgttaaaaacattttcatttgcgcatgtgtcgtattctgcgcctcatcaagaattacaaatgcatcttctaatgttcgtccgcgcatatatgcaagtggcgctatttcgataatgcctctttcaataaatcgctctgtttgttcacgcccaagaacagtatatagaccatcatataaaggtcttaaatatggatctaccttttctttcaaatctcctggtaaaaatccaagtgactctcctgcttcaacagcaggtcttgttaatacaatacgtttaacagcacctttacggagttgctttgctgcataaactacagctaagaatgtcttacctgtaccagcaggacctataccaaatactaaatcattatttttcatggcattaacatatatacgttgccccatcgttttcgcacgaatcgtcttaccaaatgcatctttagttatctcttcatcatataaatctaacagatgttgaattgtgttattatgcgccattttaatagctgcttcaacatctttaattgtaatattattacctaaatcaataaccttcagcaaattgattaatactgattccgctttttctacgttttctatttttgtacctttaacggcaacttcttgtcctcttgcatggatgacaacatcgaaactctcttcaattgcttttaaatgttcatcattatttccaattaaagcttgagattggttcatatcgtctatttgtataattccaggcatacacgcgctccttttcatatatcatttatattcattctatgatgctttaatatctacttaattatatcatgcaattgattgatttaaacatctttgcattgacttactcatttttctttaatttaaaataatcatttatacttttcaccttgtcataaaagcagattcaattttagactaatcaattttttgttgtaatttaaataactaatatttctcgaaagattctctttgtttttcaatttttcttaacgtaaaaaaacaagcaactaccattacgatagtgcttgttttcaaaaaattttataattgttttggtttagctaaaatttctgaccatatcataccattgattacttcatctttatcaaattggaacgctgatttagtcaaatctttttcgacattttgagaattaagcaactgctttaatttcaaacgttttgtacgttcagataagtatttatcctcaataatatctctagcacgtttttccattttagcaatttgcttttctttttctctatcaatgtcagtacgaatcgttttaatatcatctctaagtgatttttctaattgacgtctaatttcgtcagaattatcttgtctagaaggtctatgtttctgctccaccggttctgctttaggcactgtaattggtttctctgtcatcggttttgtttctggttgttttttaggtgccataggttctacaacaggtttcgatttaggctcttcctttggaagttcatcgaataaaggtggtaacgtatcatcatattttcgtttcgatgatttcttttcttcttcatttaattcttcacttatttctttaaacgttcgctcaatttcttcaaaaaagccacctttttttggttcattatcggtagatgttttttgaggtggcttttgattttgtctatctttatgactattttcgcgcatagtagtaatgatagaaatgatcactgatatgacaaaaattagaataccgacactcatttaatcacctctcgacttaatgttcaggtgactcatcatcactttgatcagttcgtttattaattgcatttctcatgcctgtatcagcttcgatatttttcaaattataataatctttaacactgatattacctgaacgtaatgcttcagccatagctaatggtacttcagattcggcttcaactactttagcatgcatttcttgtacacgcgctttcatttcttgctcagttgctacagccatagctctacgttcttcagcttttgcttgtgcaatatttttgtctgctaatgcttgttcagtttgtaagtctgcaccaatatttttactaatatcaacgtcagcaatatcaattgataaaatttcaaatgcagtacctgaatctaaacctttgcttaaaactgttttagaaatattatctgggttttcaagtacttctgtatgatgcttactagaaccaattgttgaaacgataccttcaccaacacgtgcgatgattgtttcttcaccagcaccaccaacaagtcgagcaatattagctctaactgtgatacgagctttggctttcacttcaataccgttcattgctacacctgcgataaatggtgtttcaatgactttaggattaacagacatttgaaccgcttctaatacgtcacgtcctgcaaggtcaattgcagcagcacgttcgaaaggaagatcaatgtcagcacgttgtgcagcaatattagcgtcaacaactctgtcaacatttcctcctgctagataatgcgattctaattggtttgttgttaatgctagtcctgctttatgcgctttaattaatggcgctataacttttcttggagatacacgacgtaaacgcataccaaccaatgtacctataccaacatgaacgccagctgctaacgctgaaatccataaaccaatgggtacaaatgagaataaaataagtaatgcaactactataataactgctattacgataaaacttaaactaaacatggtatcgctccttttaattaatctacttccctcacaactactcttgttccttcaacttcaaggatttttaccgttttattgcgtaaaataaagttgccatctgaaacagcatcaatacgttcattttcacaaaaaataatccctgcaggtcgaagatctgtaactgtttgagcagtctttcctacgaggtgcgagcggttatcatgagaattgtaacctgactcagaattagttgaatcttttaagataactttatccaaaaacggaatctttctgttgaaaatcttcactaatatcacccattctacaatcgttaaaatcaaggcaacgataacattcgcaagcataaatagcaaattatcaccgagcgttgttatgcttatagttatcagtatcatgccaataataccaattactgcaccaactacaaataattcaattacaactaatataacgccaattgagaatattaagatagaatgcatattgacatttccttggattagaaatcccaaaaataaaataagtaatgataatgtggcgataataccagctgcattgatttttttagagtaaagttgatatacaaatcctaagaatgtcaaacaggttaatattaacgtaaaaataggttgaacaattatattactaacttgttcaacccaagtatctccagccgttgattccaagatagttgtcatttgtaaaaaattattataactcacaatttcacctcgccctcacattaattatacatgaaattgaatatactttatagttataagaacctatagaatatcaatttgattatttataaactatataactttttttaattaaaaattgacaacaaaaaaacatcacatattagtgtaagacactaacttgtgatgtttgttttatataattaatattcgtgttgagggagtcaacagaggtattaattatttgaatttacgtttacgtgcagcttctgatttctttttacgttttacgcttggtttttcgtaaaattcacgtttacgtacttcttggattgttccacttttagaaactgaacgtttaaatctacgtaacgcatcttcaagtgattcatttttacgtactactgttttagacatctgtatttccctccctccaaatatcaacggaactttatagtcaattgcacagtaaaactatgcatttataagtataatatatctgtaatttatggtcaattagtaaattgttttttatttgaaacatatttcacatcaaaatcacaaagacttttagattttgttctaaaaatctcttaataatttatttaatgagaagagttgcttatatagtaaattgtgaagccgttaaaacaacgttacaaaacctatatctttaatacgaaaccttatggtatgaatcaaggaatacttaaactaaaacttctctatcagatttatttgttgcgaaatcaacaactttaattgcttgcccttcatttaatggataatttgcttgcgtaattttaacttttacaatttgacctatgagtgattcgtcaccttcaaattgtactttcatataattatctgcatatccaactaatgtgccttctgtgtcaccctgttcctcaggaattacttcaagcacatcttgatcaaatttagacgcatataactttccgagttgattgcttagcgtaattaacttatgcacccgttcatttttaatttcttcatcaatttggtcatccattcttgcagctggcgtgccaattctaggagaataagggaaaacatgcagttcagagaacttatgctttacgataaaatcatatgtttcttggaactctgcttcagtttcacctgggaaaccaacaattacatcactcgtaactgccaagtctggtaaagctttatgcaattttgttaatcgttctgaaaatctatccattgtatacttacgtctcatacgttttaatactgtatctgaaccagattgtaatggaatatgcaaatgacgcacaacttttgttgaacgttctaaaacgtcaattacttcatctgtaagttgacttgcttcaattgaagaaattcgaattcgttctaatccattaatcgtttcaagatcacgtaataattgggccaagttataatcttttaaatcttgaccatatccacctgtatgaattcctgtcaatacaatttccttatatcctgaattcactagttgcgtcgcttgttcaactactttttccggatctcttgaacgcattaagccacgagcccatggaataatacagaatgtgcagaagttgttacaaccttcttgaatttttaatgacgcacgtgttctatctgtaaaatatgggacatctaattcttcatatttacgatttttcatgatatttccaacaccattaattggttggcgttctttacggaattcatcaatgtaacctaatagtttatgtctatcttgtgtaccaactactacatcgacaccaggaatttccataatttcagctgatgaagtttgcgcataacaacctgttacacagattacagcatcaggattttgtcttattgcacgtctaattatttgacgactttttttatcacctgtattcgttactgtacaagtattaataacaaatacatcagcattcgcttcaaagtcaacgcgctcatagtttgcttctttaaataattgccagattgcttcagtttcataatggtttactttacaacctaatgtgtgaaacgcaactgttgacataaatattcaccccattaattctttttcataacttattgcacttaacgcatacaatggcgcagtttctgcccgtaaaattctcggtccaagaccaacaactgtactagtattactaaataatgaaatttcattttctgacaaaccaccctcaggaccaaaaatcatcaacactttatcctgagccttgaattgttgtaaagtttgcttgaaattgcttaactcaccatcttttgcttcctcttcatatgcaataagaatatagtcataattatcaatagtatcacaaattaattttaaattcgactcgaattgaatagatggaatcactaaacgatagctttgttcagcagcttctttaattattttttgccaacgctctatctttttggcaacttttgcctcgtttaatttaacaattgaacgttccatgctcacagctataaatgatgaagcacccaattcagtagctttttgtagcaaccactcatatttgtcagctttgattagtccactgcaaatcgtaacatcaactggcaattctgtattaatattttgtttttcttttaaatcaactgcaattttatcacttgttatgtcagcaatttcacataaataaactgtttgatcattaaaagttaaaataattttactaccaacatcatatctcattacatttgttatatgatgaatatcttctttttttgtaataaaaaaacgctgacttacatcagcgttttggtctatgaaataacgttgcacattattcactcactttctggccaacaagacaaacccaaccgttgtcatgttgttctgaaataattttaaaacctacacgctccatatgtgactgtataccttcatacttctcttttataataccagaagtaataaaataaccgccttcatttagagtattataagcatcttcaatcatttcatcaataatatgcgctaaaatatttgctattacaatatcaaatttttctgtttcgtctttcaataagttacctggaacagcttcaattaacgtttcacaatgatttcttctgaagttttctttagctacattcactgccatttcatcaatatccaacgctttaatacgttttacaccgattagatgacttgcaatacttaatatacctgagccagtaccaacatcaattactgaatgctgtggcaatacatatgtttctattgccttcaaacacatacttgtagtcggatgatcacctgttccaaaagccatacctgggtcgagctcaatgcaaagctcttcatccgcttctttagcatatgtttcccaactaggaactattgtgaacttcttcgacgctcggaatggatggaaatagtttttccattcattttcccaatccgtctctgcaataatttgctcactgaattgaacgttatgttgatcaagttcatctaaatttaataactcatctttaatttgctgtcgcaacttatcatcataagtcatttcattaaaataggctttcaatcttactcccttatctggataatcctcttttttcaaagcgtaaatttcaccgtatttatcttctggttggttaattaaatcatctgaatcttctatcacgacaccatttgatccatgattttcaagtatattggtagccaattctactgcttcatgattaataataattgaaagctctgtccagttcatactttattctcccttaaagaatctttttgctctatctttaaaattcgaaggttgttcattaatttcttcaccatttaattgggcaaattctttcattagttctttttgtctatctgttaatttagtaggcgttactactttaatatcaacatataaatctccgtatccatagccatgaacattttttatacccttttcttttaagcggaattgcttacctgtttgtgtaccagcagggattgttaacataacttcattatttaatgttggtatttttatttcatcgcctaaagctgcttgtgggaagctaacatttaatttgtaataaatatcatcaccatcacgtttaaatgtttcagatggtttaactctaaatactacgtataaatcaccagcaggtcctccattcacgcctggagagccttcaccagctaatctaatttgttgttcattgtcgacaccttcaggtactttcacttctaatttaactgttttattttcagtaccttttccgtgacatgttggacaagcttcttcaaattcttgaccacttccattacatttaggacaaacttgttcagtacgaactctacctaaaattgtgttttgttctacagctacatgaccagcgccattacagtaactacaagtctttttacttgttccaggctttgcaccatcaccatgacatgtttcgcatgttacatctttacggattgaaatttcttttgttgtaccaaataccgcttcttcaaatgtcaatgtcattgtatactgaagatcatcacctttttgcggtgcatttggatctctttgtctgccgccaccgaagaaagagctaaagatatcttcaaaaccgccgccaccgaagccgctaaaaccaccaaagtcagagccattgaatccttgtccaccaaaaccttgtggcccgtcatgtccaaattgatcatagcttgcgcgtttattatcatcacttaaaacttcataggcttcagaaatttctttaaacttttcatctgcaccttcttctttgttaatatctggatgatattttttcgaaagctttcgatacgcttttttgatttcatcttttgaagcatatttactaatgcctaaaacttcataatagtctcttttggccacagctatctctccttttcttaattaacttatatagtttaacgtaatatgtcatactatccaaataaaaagtcaaagccaatgttctattgactttgacttttcagatcatgacaacattctaattgtattgtttaattattttttgtcgtcgtcttttacttctttaaattcagcatcttctacagtactatcgttgttttgaccagcatttgcaccttgtgcttgttgttgctgttgagccgcttgctcatatacttttgctgataattcttgaatcactttttcaagttcttcttttttagatttaatatcttctatatcttgaccttctaaagcagttttaagagcgtcttttttctcttcagcagattttttatcttcttcaccaatattttcgcctaaatcagttaaagttttttcaacttggaatactagactgtcagcttcgtttcttaagtctacttcttcacgacgttttttatctgcttcagcgttaacttcagcatcttttaccatacggtcgatttcttcgtctgataatgaagaacttgattgaattgtaattctttgttctttatttgtacctaagtcttttgcagttacatttacaataccgtttttatcgatatcaaacgttacttcaatttgaggtttaccacgttcagctggtggaatatcagtcaattggaatctaccaagtgttttattatccgcagccattggacgttcaccttgtaatacgtgtacatctactgatggttgattatctactgctgttgaatagatttgagatttagatgtaggaatcgtagtgttacgttcaattaacgtattcatacgtccacctaaaatttcaatacctaaagatagtggtgttacgtctaataatactacgtctttaacgtcacctgtgataacgccaccttggattgcagctcccattgccactacttcgtccgggtttactcctttgttaggttctttaccgatttcttttttgacagcttcttgtactgctggaatacgagttgatccaccaactaagataacttcatcgatatctgagtttgttaagccagcgtctttcattgcttggcgtgtaggttccattgttcttctaattaatgaatctgataattcttcaaatttagaacgagttaagtttacttctaagtgtaatggaccgttttcaccagctgagataaatggtaatgagatttgagtttgtgatacacctgataagtcttttttagctttttcagcagcatctttcaaacgttgtaatgccattttatcttgagataagtctacgccattttcttttttgaattctgcaactaggtagtcaataattacttggtcaaaatcatcaccgccaagtttgttgtcaccggctgttgatagtacttcgaatacaccgtcacctaattctaggatagatacgtcaaatgtaccgccacctaagtcaaaaacaagaactttttcatctttatcagttttgtctaaaccatatgctaatgctgcagctgttggttcattaatgatacgctcaacttctaaaccagcaattttaccagcatctttagttgcttgacgttcagcatcgttaaagtatgcaggtactgtaattacagctttgtcaactttctcacctaaatagctttcagctgtattttttaagttttgtaaaatcatagctgagatttcttgtggtgtgtatgatttaccttcaatatctactttataatcagtacccatatgacgtttaatagattgaacagtgtttgggtttgtaatagcttgacgtttagctacttcaccaacttgagtttctccatttttgaaagctacaacagatggtgttgtacgtgaaccttcagggttttgaattacttttggctcatcgccttctaatactgttacacatgaatttgttgtacctaagtctataccaataattttactcataataaaattcctccatttaatcattaaattaatttaattttaaacaatgtcttttcgccaaatttaagttattggtttactttgaccattgatggtcttaatactctatctttaagcttgtatcctttttgtagttcttgagtgatttcgccagattcaaaatcagggttatcatcttgaactacagcttggtgaatatttggatcaaatgcttcaccttcagttttaataacttcaagaccattatcttttagtgcgttaatcaaactttcatgcaccatttgtacacctttttgaagagatttaaaagtctcatcatcaccttcaatttgaagtgcacgttctatattgtctattgctggtaaaatatctgttaacacacgttgtgcttgatatgttttatttatttcattttctttttgaattctacgcttataattttcaaactcagcgtagagccttaaatatttctcttcgttttcatctgctaattgttgaagttcattaattttttgatcttttggatctatttcttcaataacattctcgtcagacgtttcttctattgcttcatcttgtaaatgacctttactttcttcagcttgttcaactgaatcatcaatattttgtttgatgtttgtttcttcaactgttgattcagtgttttttttaactgattcgtctttatttgtcattttctgtcctccaatactttctaatccatcattaccaaattctatttaataattgaatgacattttgataatgcatagctgtaggtccaatcacagcgatttgaccttttaacgtttcatcaaaatgatattgacttgttacaattgaaatatcacttaagctgtcatcaatttcattaccaatttttacattaatatttggtgaagatatatcttgtaataattctgcaattctatttgattctatatattgtagaatgggctgaattgaagatacattactttcattcaatgcatcaataagtttaacctttccacccatataaatgctattactttgattagaaatatgattattcatcgtatttatcaatttattgataaatatttcttcctgctctgattgaacaaaagagacaatatcatcttgtaaattctgattaaactcagttagtttgttagtaacaaaatttgatattgtatttagtttatcattactaaacggtatgtctgaagcaagatgtacatgctcaacatgacctgatgaaaatacgataaccattataactaaattaggattagcacgaatcaaatgtacattattgataatatcttgtttatgattaggatgaacaactaaagttgtatattgagatatatttgataattcatctgcaaaatatgtcaatgctgatgatacatcatattgattctcaactaacaattgatttaatcgtcttaatttatttgttttttgatgagatgtttgttcaagtaaacgattgacataatacctaaaacctaattgtgatggcgaacgccctgaagaactatgtgtcttttcgatatagtttaaatcttcaagctgtttcatctcatttctaattgtagcaggactaacattcaagttatgtcgctcaattagtgttttagaaccaacgggttgtccaaaatcaacataatcctcaacaattgcgtttaatatactcaattgcctatctgtaatcatgttttcacctcattagcactcacttatctcaagtgctaattataatttatcaaattggtcaaagtaagtcaatgttaaagactcgaaatttcaattttttttaatcatttattaggaaagcttcaaaaacctcattacctatgactttccctctatttgtaagtgcaatcgcatcgttcttttctacaattaattccttctcttttaaattatttattgtttgaccaaagacactttcaatagattggtcaaacttctttttgaacctactactactcacaccttcatttaaacgcaaaccaagaaacatttcttcttccattctctcagtcaaagaaggtttatttgatactaaaattgctttactttctttatttatagctttgatataatgattcactggattgatattcgtataacgcacaccatctacataaccacttgcacctgctccaaatccataatattcctcattaaaccagtaaaccttattatgttctgattcatggccatctaatgcaaaattagatatttcgtattgatggaaaggagattgttctatcttagacatcaacaactgatacatgtcagcacctaaatcctcattagggagtttaagcaacccttttctatacatattataaaattgggttttaggttcaagtattaagccgtaactcgaaatatgttgaatatccatatctaaagctagatctaaactttgttcaaaatcttcaatcgtctgtttcggtaaatgatacattaaatctaaactgattgatttaatacctgcgtttttagcatttaacaccgaagtgtaaatatcttcagtattgtgcgttctacctaaaacagacaataactccggcttgaatgtttgaacgcccattgaaattctgtttactccatatttttctaatagttggactttctctttagttaactcatcaggatttgcttcaaatgtatactcgcctgtgattgtaaacgtatcacgtattgctttaagtaatctttccaactgattaatagaaagggccgttggtgtgccgccacctacatacatggtctttaagttcctatattttgctgtagacatttctgttattagtgcatctaagtactcatctacaggttgattctgtataaaatatttattgaaatcacaatatgtacatattcttacacaaaatggaatatgtatatatgcactttgtaccgtcattttaatgccccgcttctcagactgtttatccaatcggctacatcttgttggactatctgctattattcttacttttaactttaacgtttaatcaatgattgtctaatatatcgattcattttgatatttattcttgtttagagggagtgagatagaaataataaagaaccactaatgatttattatgtagtggctcttacacattagccagaggtaatatgtacttaaaaatagaattacatgagtaaaactcatgcataagggagtgggacagaaatgatattttcgcaaaatttatttcgtcgtcccaccccaacttgctttgtctgtagaaattggcaatccaatttctctgtgttgggtccccaccccaacttgcatattattgtaagctgacttttcgtcagcttctatgttggggcccacaccccaacctgcattgcctgtagaatttcttttcgaaattctctgtgttggggccccattgttataagctcattttaactctgtcgatgactgccaatataatattgtaaagcccaggacgttaatttatcctaggctccctctttttagttattaaactttattcattgtaaattgttaatagattttttaaaaaattattcgtcatccattttcaatacagccaagaaagcatcctgtggaatttcaacattaccaactgctttcatcttagctttacctgctttttgtttttcaagtaatttacgtttacggcttatgtcaccgccataacatttagctaaaacgtttttacccattgatttaatatttgtacgtgctacaattttttgtcctattgcagcctgtacaggtacttcaaattgctgtcttggaattaacgttttaagtttttcaactaatgctttaccacgttcatatgcaaaatctctatgaactatgaagcttagagcatccactttatcaccgtttaataaaatatccatcttcactaaattactttctttattttcgatgaactcataatcaaatgatgcatatcctttggtattagatttaagttgatcgaagaaatcaaatacaacttcagctaaaggtaattcataaacaatatttacacgaatatcatctaaatagtccatatttataaattgtccacgtttacgttgacataattccattactgcacctacatagtcatttggaaccatcatagttgcacgaacatatggctcaaatattttatcaattttatcacgatctggcatttgtgctgggttatcaaccgtcacttctgaaccgtcccttaaaatacattgataaattacagatggtgctgttgcaattaattcaatgccaaattctctttcaattctttcttgaattatttccatgtgtaacatacctaagaaaccagttctataaccaaaacctaatgcttgtgatgattcaggctcgaattctaatgatgcatcattcaattgtaatttttctaatgcttctcttaaatcattataatttttgttatctattgggaacagtccgcaatataccattggattcattttcttataaccttgcagtggttctgatgcaggtctactagctaatgtgattgtgtcaccaaccctagaatcatcaacatttttaatacttgcaataatataaccaacatcaccaactgttaattcatcaacaggaagctgcttaggtgtattaattccaacttctgttacttcgaactctttaccagtggccatcattcgaattttatctccggctttaacaacaccgtctacaattcttatcgatgaaattacccctctatatggatcatactcagaatcaaatattaacgcttttagtggtgcttctgggtcgccatctggagctggcacaacttcaactattttctctagtatctcttcaattccaatgttagatttagcacttgctaaaacaacatcgtcttggtctaaacctatcatatcttcaatttcttgtttcacgcgttcaggttctgcagcaggtaaatcaattttgttaataacaggcaataactctaactcattatctaatgccaaataaacatttgctaatgtttgtgcttcgataccttgagccgcatctactactaaaatcgcaccctcacaagctgccaaagaacgtgacacttcatatgtaaaatcgacgtgtccaggcgtatcgattaaatggaatgtataagtatttccatctttagcttcgtactttaaacgtactgcgtttaatttgattgtaataccacgttctctttctaaatccattgaatctagtaactgatcttgcatatctcttgtttcaactgatttggtattttctaaaattctatcagccaatgtagattttccgtggtcaatatgtgctataatcgagaaattccttatattctttcttctttttaagcgttgctcattatccattttatccttctcactttcataaaataaacccgtattatctttcgcatctttgatataataacgtttttaataggtaaatgcaaacgccataatcttggatgaactttgaaattataacaatctttatttaaatacatacttgcgatatgttaatatgttaattacgtacttataattataaaacgtattgattgtgtttccaacacaatttattaaatctgcaaaattttaagctaaccccatcaaataaatgattgcacaacggttagacttttgttaaaatatttcttgttgtaatcaaataaaattttgataagatgaactcacttttaggaggtgacagaaatggcaaatatcaaatctgcaattaaacgtgtaaaaacaactgaaaaagctgaagcacgcaacatttcacaaaagagtgcaatgcgtacagcagttaaaaacgctaaaacagctgtttcaaataacgctgataataaaaatgaattagtaagcttagcagttaagttagtagacaaagctgctcaaagtaatttaatacattcaaacaaagctgaccgtattaaatcacaattaatgactgcaaataaataatctttttaaataaaagttcaagcgcatgcttgaacttttattttttataaagatagaatgaataattccagtattaactgtttatccatatatgatgatttaagtttataatcagtttccgcacaagcatctataatattcaataattcatcaagttgataatgtcttacttgtcctaacgctaattttactctgtatggatgtacgcctattgttttagcaatttgctgtccactatatcctttttgactcaaaatcttacattgataaaataatcggtaattacttgtgattagtgcaagtaatttaataggttcttctttcatagttattaaatcttttactaaatgaattgcttgttctttctttcttttctgaatgtattcagtcagtaaaaatacattttgctctaaacttctattaataatttggttaacatcctgcttattaattgttggtctatcgcctaaaaataaaatcaacttttctatctcttgtgagacaatattaaagttaatacctgtcaactcaataaataaatctaatgcatctcttttgatatctttgaaattctcatttaatttactttgaatccatttttttatttcttcttcagacatttgctctatttttttaagccttgcatgcttttttagagttttagttaacttttttctttcatcaagtttattttgatatatctcaaagacaatcaaattttcgccatcatatttttcaataaattctattaattgatttacattatgagccatatcttttggcgctttttcacctgtaaatatatatgcatttttaaccaaaattgcttttttatctgaaaagaaaggcaatgttaatgtttcttcaacaattggtgcaatctctgtttcgtataaattatatttcacaaagttaaagtcatctctatcacttttcaaaaattgtgatataatttctgcactttgtttttcaaccaattcaggcacatctccataaatagctacaatattgtcgctcattcattacatcctttcattcgtttgacacatcaatagattatatcatgtttctgtatctataaaccacttgcatttccataagagtttgaatcaacttttaaattatcatctaagtcaattgtaacttgaccgttttgttgactattgtaaatgcgactgcgaatcctttgcaatcgtttaacaacttctatattaggaagatgatacatattgttcttcccagaagaaatcaaacttattttaggcttaatcatctctataaattctttagaactacttgtcttgctcccatgatgacctacttttaaaatatcaatctccggcaagttatatttttttagtagtaaagattcattatttttactagcatcgcccattaataaaacttttttattttgatatgtaatcatagtaataatcgaatactcatttttatctcggctatttggaataaaactatcaaaaaatagaaaactactatctccaagtttaaaactactaacttgtcttacatctataagtttaatgttgtacttatggcttaatttcgataataacatcaatgtattactactatatcccttattgtatatcactatatgtttaattttaatatgactaataatatattccacttcaccaatatggtcattgtgtggatgtgttaaaattagatactctaattcatttatccctctttcatttagcgttggtaaaatatgatatttagaaattgaataactaggttgtttagtatcatcaatcactttcccacctgtatcaatcaagacattttggttcttaccgccttcatataaaatactgtctccctgccccacatttaacattgtaattttgtgatgtgaatttgttggaaacgttattaataatgtcagaataattatagtccaaaacgtaaccaatatatatttacgtttagccaataaccaaaatatgtaataaacagaaattataaatattataaatatccaatcattaaacttgggaacagaaaaatgtgattgcttaattcttgtgaataggtctagtaaccagtcatgaaaattaaaacttaggtcaaccaagtaatttagcggcgttaatcccacaataaaatgacttgtaataaagaataaaatagatagcggaaacaatataatcgaatagtacggtacaaaaatcaaattagataaaaatcccacccattgaagttgatgaaagtttggaatggcaacgataaatgaagctaattgtgcaataaacgtaattatgaataatgattgtaactttgacaattgctgtaaaaaaggaaaaagtagcataataaaaaatgaaatgatgaatgaaaattgaaatccaatatcataaacaactagtggatttaaaataaacataattataaatgcaaatgctaatagctgaataccctttattttaatttgcttagtaataagcagtacaagagttgtcattattatagctcttacagcactaggtgcataatttgtgtattgagcaaataaagctaatacaatgattgtaattcctttaatgacaaataaaggtaaatttaatcgttttaaaggtttgtaaattaagaatacaattgcagctatatgcgagccactaactgccagcaaatgatatatacctatctctttaacacgttccttaaattgctcattaatttcttttacgtcaccagtaatcaatgccataatacgatccggaaacttaatacccgaatcataaattcgattcattataaactgtttatgtttctcaattaaattagaccggttcgattctaggcagctttgtacaactatactttgtaatttaagagttacaaacttattgtcattaactttgaattgtcctttaacaatacaattacgactttcaattttctttaaatcaaaattctttttatttgttaaaaagaaaggatatatttcattttttaaactcaacctacctttatatgtgtcactaccttgacgttgaatttggattacttgagcacgctcattaaactgagaattacgttcaatataattgatataattaaatattgcttgttgtgaataatgtaaataccatgaggagaaaatgattaaaaagagagaaataggggcataaacgattttatttttacgataagtaatatacaaaagtaaaatgaaaagaaatgtagagagcactttgctagaattccaaagcactcctacaatcattgataacgcgacatacagcaaaacattaacctttagtcagatatttagcaacatattctggtgaaaatggaatttttttaaattcaataccagattgtttgagtaatttagttgcatattcatggttatgataatcttctgcatagtagatacgctttatacctgcttgaataattgactttgtacaatttaggcatggaaaatgagtaacatagattgttgcaccttcagtagatacaccttgttttgcacattgtaataaagcattcatttctgcatgtatcgttctgatacaatgtccatcttcaattaaacatccttcatctatacaatgcacctcgccagctacagagccattatacccaccagcaataatacgattatccttaacaatcgttgcacctacagataatctttgacaagttgaacgtaatgctagcaaatgactttgtgccataaaatattcttcccatttgattctttccaagatgttcaccttccatacttaaaatttagtaacattttctaataatataagattaatcacaaaaaataaaatttgcaattaaaataatccattatgtcgtgaaataagatttcagtttatcaaaagttttacttccaaaaccttttacttttttcaaatcgtcaatttcttgaaatgcaccttgttggttgcgatattcaacaattgcattagctttagcttgccctactccaggaacagacatcaattctgatacagatgccgtatttaaatttactttagtattatttgtgttcccattttttacgtgcacactgtttacttcaatttgtggttcaacattcttttgtcctttatgaggtatgaaaatcattttttgatctgttaatttttcagacaaattaattcgacttacatctgcatcatccaataattgtgctttatcaagtaaatcaactactctatccttagatgtcattttataaacattaggatgtttaacagcaccttttacatcgacatatacaggacctttatttttggaattatctccatctttgacctggacatcttctaatttggacaaactattattttcactagtgctttgtttcagagcagtatctttattttcaaaatttcttgaagtataatcatcttgtctccagaatataaaaccaattaataccataattaaaacaacagcacttataatatataacttccattgagttaaaaaatctttatagcgtaataaaaattgatacaataaaaccactcctcaactttatacacgtctgagcgagtggttttacttttattttttcgcaatgaaaaacaatctttctgcatcttcattatgttcatctatattaaaatcagtaaatgtttcaacatgtttaaaaccaacttgagctaaccaagacaaatatgtcttttcatcaaatgttctctgaaaatgagactcatcaaatcttgaatatgtttcatcttcatgtcgaatgaaaaatgtcatatcatgataaacacttaaaggtaaatctccttgcacagcatcccatgctaaaaaaatgtcccctttatcatcaatataactttgattattaaacaaagtcatcattttataaacagtatgtacatcaaaaataaatacacctgaatcagtcagatgatgataaacattgatgaatgtttcaatcactgcagtttcatcttgcaaataatttagagagtcacaaaaaatagtgatgatatcaaattgttgttgcaaatcaaaagatgtcatatctccttcaagccaatttacatttgctgatttttgagctgcaacagtcaacatatcaacacttaaatccataccagtaacattacctaaagcttctaattgaactgttaaactaccagtaccgcatccaatatctaaaatatttgattcatctttgcagtgattttttacaatttcaaaccatttttcatatggttgatcttgagtcaattgatcgtacactaggctcatttctgcatattgcgacataattaatacgcaacctgactatatgattctaatggtgcatcttgatataacttttcaatattataataatttctttcgtctttatggaaaacatgtaccacaacatcagctaagtcaattaatatccaacgcgcttcattgtatccttccatacgttttacttctatattttgttcattggctacttctttcaccgctctagcaatcgcttgaacttgtcgttcattatttccgtgcgttacaacaaaataatctgtcatatcgctgatacctttcatttctaaagaaatcgtatcttcgccttttttattgtcaattgcatccacagcaattgctaataattcttgtgaattcatttaatcatcctttattctttcgtcactatagttataataatttaaacagtcaatcgtcttattatataccgtaatatctttctgtattaaaaatagtactgtgcgtttagaaatttcataaattgtcttatctaaactaccttgattgtatgccatatctcgaatatcatcaactcctgggattgttcttccaggttcgatgtaatctgcaataaaaatcagtttttcagtttttgtcatttgttgacgtccagtagtatggtatttgatagccattaatacttcctcatcattgataccatattcatgttccatgattgctgcacacacagggccatgcaatatttcactaccataactcagtagatcattacctaattcgtattgtcgaacaatttgatacattttacctaaatcatcatatttacagaaatcatgtaatacacctgctaattctactttactagtgtctccatcataaatttctgccaatttaatcgctgtttctgcaactcttaaagaatgattataacgtttctctggcagtttctcttttgcaagccgttttgctttttcaatgttcatataatccttcccccttaatatagttttcaacggatttaggaacaagaacttggatagatttcccttcactaactctttgtcgaatcattgtcgaacttatatctaccctaggtatctgaattgcaatcatagcattttcaacattttgactatttttgtctcgatttacaactacaaaagtaaccatttcttttaagtattcaatttgataccatttctctagttggttatactgatccgtcccaataacaaagtacaactcactgtctttgtgttgctccttgaatgccttgatcgtgtcataggtataactttgaccaccacgtttaatttcatcgtcacaaatatctccaaaaccaagctcgtcgataatcatctgtatcattgttaatctgtgctgaacgtctataaaatcatggtgctttttcaatggagacataaaactaggtaaaaaataaaattcatctggctgtaattcatgaaatacttcgctagctactatcatatgtgcagtatggatagggttaaactgaccgccgtaaagtactatctttttcattattatggcaattcaatttctttattatctttagattctctataaatcactatcatagatccaatcacttgcactaattcactacgcgtagcttcgcttaatgtttcagctaattcttttttatcatcaaagttattttgtagtacatgtactttaatcaattctctgttttctaacgtatcatctatttgtttaatcatattttcgttgataccgccttttccaatttgaaaaatcggatcaatattgtgtgctaaacttcttaagtatcttttttgtttgccagtaagcatatgttattctccttttaattgttgtaaaactgctgttttcatagaattaatatcagcatctttattagtccaaattttaaagctttccgcaccctggtaaacaaacatatctaagccattataaatatggtttcccttgcgctctgcttcctctaaaataggtgttttatacggtatataaacaatatcactcattaaagtattgggagaaagatgctttaaattaataatactttcgttatttccagccatacccgctggtgttgtattaataacgatatcgaattcagctaaatacttttcagcatctgctaatgaaatttggtttatatttaaattccaagattcaaaacgagccatcgttctattcgcaacagttaatttgggctttacaaattttgctaattcataagcaatacctttacttgcaccacctgcgcccaaaattaaaatgtatgcattttctaaatctggataaacgctgtgcaatcctttaacataaccaataccatctgtattataccctatccacttgccatcttttatcaaaacagtgttaactgcacctgcattaatcgcttgttcatcaacataatctaaatacggtatgatacgttctttatgaggaattgtgatattaaagccttctaattcttttttcgaaataatttctttaattaaatgaaaatcttcaattggaatatttaaagcttcataagtatcatctaatcctaaagaattaaaatttgctctatgcataacgggcgacaaggaatgtgaaataggatttccgataactgcaaatttcatttttttaatcaccttataaaatagaatttcttaatacaacatcaacatttttaggaacacgaacgattactttagcccctggtcctatagttataaagcctagaccagagatcataacatcgcgtttctctttgcctgtttcaagtctaacagcctttacctcattaagatcaaaattttgtggatttccaggtggcgttaataaatcaccaagttgattacgccataaatcattagccttctccgttttagtacgatgtatattcaagtcattagaaaagaaacaaactaacggacgtttaccacctgatacataatctatgcgcgctagaccgccgaagaataatgtctgcgcctcatttaattgatatacgcgttgttttatttctttcttaggcataataattttcaattctttttcactaactaaatgcgtcatttggtgatcttgaataatacctggtgtatcatacataaatgatgtttcatctaaaggaatatctatcatatctaaagttgttccagggaatcttgaagttgttactacatctttttcaccaacactagcttcaatcagtttattaatcaatgtagatttcccaacattcgttgtccctacaatatacacatcttcattttctcgaatattcgcaattgatgataataagtcgtctatgccccagcctttttcagctgaaattaatacgacatcgtcagcttccaaaccatattttcttgctgttcgttttaaccattctttaactcgacgtttattaatttgtttcggcaataaatccaatttatttgctgctaaaatgatttttttgtttccgacaatacgtttaactgcattaataaatgatccttcaaagtcaaatacatccacgacattgacgacaataccctttttatccgcaagtcctgataataattttaaaaagtcttcactttctaatcctacatcttgaacttcgttataatttttcaagcggaaacaacgtctgcaaatcacgtcatcacgaaacatattatgctctggtacaaaaccaggtttatttttatcttcagattgaagtggcgcaccacaaccgatacattttaaaatgtcagacaatcaattttcctcccatgtgatataaccttttttactgaaatgacgtaataatcgtctttcaattaatctattaaacttagtaataaagccatcagttcgtttaactggaacaaccataattgtatatagacctcgacgattaccaccaaatacatcagtaagcatttggtcacctataacaacagtttgatctggtctgatattcatcttagttattgctttatcaaacgctttccccattggctttctcgctttaaaaataaaatcgatgtctaaatgctgactaaaactagcaacacgagactcattattattagacacgattgtaatagtgattcctttttcattagcttccttaaaccatgctttaacacgttctgtaggttctttaacatcccaacctactagcgtattatctaaatctgtaataatacctttaacgcctttgtccactaacttgtctaaatcaatttgaaatattgattgaacatatgaattcggcataaaaaacttgcgaactaaacccatttaactcacctttacctttttataattgagacactaatgctttaacagtttgacttgatgatacagctgctttttctaaaaatgcttcgaagctcatttccgcttctccatttgctaagtctgaaactgcacgaactacaacaaatggtacattaaattgataacatgtttgtgcaattgcagttgcttccatttcaaccgccatcgcatttggaaatgcttttttaattttttggcgttgttcaacactaccgataaagctatcaccacttacaattaagcctactttagctgttaattgttgttgttgtacaacttgagatactttttctattaaaggtttacttgattgaaatgctaccggcatctgtggtatttgtccatattcataaccaaatgctgttgcgtctgcatcatgatattttacatcatcacttataagaacgtcacctacatttaaactttcatctaaagctccagcagaacctgtattaataatgacgtccggtttaaacttattaattaataatgtcgtagaaattgcagcattaacttttccaatgccactttgggtaatcactacttctctatcttttaaaatgccagtataaaatttaacatgtgcaactgaaatttcgcttaattgtgttaatttattttttaatattgttacttcttcttccatggcaccaattataccaatcatcttttgattcacctcttttaaaaaatcctagcatttgttattttatcacattttaatcactacaacgacaagtatcatgattttcattactgtataaaacttttgctttatttttataaaaagctctctcaataacttggtatcataaataattatttttgaactcataacagtgaattcgatgcttctaatttgtctatttttcaaaaactaatcatatcaattacatcaaccaatcgtgtcaagaaactttattaaataacaggaaaatgatatgtttaaaataataatgatgaaataagaggattttacaatggctgaaaataatcaaaatagtctcgtaacaaagatagctacatacggcagttttattgcaattgcgtcgtttgtcattttatttataagtatatttttaaagttttcatttaatatcgagtttacagcaacaattatgaacatatgtcgctacactctaattctaggatttatacttatgtccttacctgatgttgttgataaaaacatcaagaaaattatattcgatgcatttattatcatcgtctttatcttctttttactatagtagttttattttgtaattacacagttaatcatatttgtttcgtatcgaattcctgtgtgcattaaagataattctaatagaaaacagcagtaagacttttctaagtgttagcatccttactgctgtttttatttgtaacaacataatgacaggtactttatatttcactgtcaaagattattaatgattaacttaattaaattatgatttgaataaatagatatctaaatgcaatttgtcactattgatagttttattatcagcatacatttttaatacctcacgaccatactcaccatttaaattataaaaatcatattctacattttgttcatcatcataatgatatttaacataccctttaacaatgtcgccaccttgttcgtacaacttatacttctcattcaaataatttcttaattgaacatctaattcttgaatggtaacaattttctttttcgtttttactgctgttaattctatttctgcttgatgtccgtcaatccataaattacaaggtatattcttataatcatcgtacttattattgtcacttaaagtaacaccaccataactacattgcgttttattggttgctcccccatgacatccgtatccataatttccagcaaatatatcgatatccttatttataaatttctttgaaagtgcctcattttcaaattcaactttaaaatcctttttccaatcatcatttacgaacatgtcatgaaataacaaatcatgcttcaacagtctatcgtttgtgtttttattttcaagctgatttggattgatgaatgacatcttagcattacttagacgctttgaatcaaacttacttttatgatgtaagtctgaatattcgattgcacttgctgaatttgtaaaaattccttctaacaataatattaaaataaatcctgttaaatatttaacttcaaactcccccaaaacaattattaatttacatttgagagcgagacataaatgataaagaaccgcttatggtttattatgtagtggttcttgagcctacaattttgattatgtatcacgttcataatactttccaatttgaaataccctgttcgcaattattagttgagttatatcaaccaatacagtgtaaacataaaaattccaaaccgtttaacagtatatcagaaaaaatgataatcatttcttttatttttattaaatttcataatgattcatataatattcgcattaaaacatcacaatactgatacacaacaaaaagagcagtacatttgtcatgcaccactctcaacaaatatatttttcaatgaagcaattacgcgatcttacaaatactataagtatagctgaatcacatattatatttattttataatcgaatttagaaattcatcacttatctcataaattgttggtctacttttaattttaactaagtagttatcatattttttaattgtattattaatttttactcttcctactcccaatatgttttctaaatcaattaatgttaatctatttcttttatttccaaacaatttatccattgaaaggagatacaaaaattcataatctatctgtttataatgactagttaaataaagcgttaatttttcagtcgcatccatttttggtattaactcatcaagtattctttcttgtcctgctatcaatagctcaagcattgtgtcaataaattccgtcaaatcaccacaattcaaataatttgaagcagtcataaacgccttgtaatatttcgatttatttctatttataacatatgaaaatgtcaaagcagtataattatcataataatcactcaagagcttggcaattataaatcttccaactctaccattgccatcataaaaaggatgtatatattcaaacagataatgactagccatgattttgaacggctgaggcgcatcaaaatattttaaaaatgttagcatttcacctatatattcaacaattttggtttcaggttgtaacccaacatgtatatatttattcgttgacccatcatgcacaccgacaaaatttttacgaaatagctctccatctaacttatcttgttcgttaatttcatttgaaactaatttatcataaatcgctctaatgtctcttacattatcaactttaatttttttattaagttctatctctttatattgatccacgaggcctctgaacttaagaaattctgatgcttggttatttaacgcatgtgcaatctcttgtttagtactaaatacattttcaatttcattagtactttgtaattcatcgattaataaatcattaaaatattgttctctagctgcatatggtaaagaattaagtgctctatcaatttttctactattaattgatattaattcttgtttttttgatagatttttagtcaccataaagaatagaggatattccaaatcattaactttttttccattttccataggtatgatattaatattagtattgaaagaagctaaagaattaaatcttttagtatactcttccttcattttactttcattgtgttcatgaaaaatactttttaaagttctgtaacccatttgcagcctcctctactcatttaaaatgtattttttgtccaataaatccattttcattagattagctaaatattatcactttttttctttaaaaactatataaatatctatttatccaaacaacagaaacagaagtttcatcataacaaaaaaagagcagtacacttgtcatgcaccactctcaacaaatatatctaattatgctttataaatgaatcaccggaaatcaaaatacatcttgcctaatactaacaacatttacagtaatgctattagtcgaaatgtcttttaaaataactgaagtacttctttgaatgagaatatacctgtcaatattgtaacaagtactgcaacgataccaaagatgaacatccaatttgggtgtttataatcaccaacaattgatttctttttacttgcaatcaaaattgcacctaacgtaataggtaaaatccatccatttatcgcgcctgctataattaaaaggctgattggttttccaataaataagaaaatcattgttgaaataacgataaacacaatcacaattaaattacttctttcgttaagtgatttatgaagtgtttttaaaaatgttgcgcttgtgtatgctgagccaattactgatgacatagctgcagcaaataacacaataccaaaaatattctttccaattggtccaattgcgtgttcaaaaactgacgctggtggattttcagaacttagtgtcacacctgttacaacaactcctaataccgctaggaatagtaacgttctcataatacctgtagttaaaataccagcaattgctgattgatttacaaatggtaaatattgcttacctttaatgccagagtctaatatacgatgtgcacctgcaaaggtaatataaccacctacagttccaccaactaacgtaatgattggcaagactaatttcattggatgttctggcgcaaatgtatgcacaaaagcatcaccataaggtggattagaaacaaacatcacatatgccacaactaaaatcatcacaataccaagaatcattgaaacaacgtccataattttttggccacttttacttacaaagattaatattgcaaagattgcagtaatagctgcgccccattttacatctaatccaaaaattgcatttaaacctaaaccggcaccagcaatattaccaatattaaaagctagaccaccaaatgcaatcaatattgagataacagtaccaagcccaggaacaactttatttgatatttcttgacctcttaaaccagttacaactaatatgcgccatatattaatttgtgcaccaatgtcaatgatgatagacagtaatatggcaaatgcgaaacttgcaaaaaattgtgatgtaaatactgctgtttgcgttaaaaatgctggcccaattgcagaagttgccatcaaaaatacagaacctaataataaccttttatgattttttgtgaattcaaagtcactttcttttttaagctttaaatttctccccattttttagccccctataaggattgaatatcaatgccttctttcattaaaatttctctaattttcgaaacaaataataatgcatgttctccatcaccatgcacacaaattgtatctgcttgtaacgttacttccttattgttttttgaaataactttattttccttcaccatctttaaaacctgcttaagtgcttcgtcagtatcagtaatcacagcatcactttcttttctactaacgagctgcccatcatcttcgtatcgtctatcagcaaacacttcagaagctgtaattaatccgacattctttgcttctgaaattagatatgaatttgctaatcctactaacactagtgatggatcaaagtcataaacagcttgtgctataacgcttgctatttctctgtcttttgcacccatctgatacaacgcaccatgcggtttaacatgattaattttaacttgatgaatgcgacaaaacccttgtaatgcacctaattgataaatcatcaaattataaatctcgtcgttagagatatctatatttcgtctgccaaagcctttcaaatcaggtaaaccaggatgtgcacctactgcaacattatgtgctttggcaagttttaccgtttcattcattacattttcatcaccagcgtgaaaaccacaagcaacattcgcacttgtaattaacggaataatttgatgatcaccaccaaaggaataatttccaaatgcttcgcctaaatcacaattcaaatcaactcgcattataattccacccctttaacaatttgatgtttttctaaaaatttaatatcaacatcttttgcatctccatcacgatatagtggataatttaaaactgcatataaaaaatcggcagttgtagaaaatccatctatcaccatttcatctaaggtggctttcaacttatcaattgctgaagctctatcatgagattttacaattactttagctactaaagaatcataatatggtgaaacttgataaccgtgatatagtaaagaatcgactcgcacattaaagccttgaggtaaatgtaacgctgtcactttacctggtgttggttgaaatttcttttcaggattttcggcatttattctcgcttctatcacatgaccattaaattgaatatcgctttgtgaaaaaggtaaatgattatgttccaataaatacaattgtgctgcaaccaaatcacgttctgctcgcatctctgtaacagtatgttcaacttgtattcgagcattcatttcaataaagtaatgtgcggtatcagttactaaaaattcaatcgtacctgcacttctataatttgctgcacgtgcaactttaacagcatcgttacatatttgttgtcgtctttcttcagttaatgctgcacaaggagattcttcgattaatttttgatttttacgttgtacagaacaatcacgttcccctaaatgtacaaaattatcctgcccatctcccataacttgaacttcaacatgttttgcaacaggtataaaagcctcaacataaacacgatcatcatcaaagtatttttttccttcacttttagcttctttaaatgccttttctaaatcttcagctttctttacaatacgtatacctttaccaccaccgccactggcagctttgataacaactggataaccgatgtctttggcaagcttctcaatttcagacacatggttcacagcaccatttgatcctggaatcacaggaacacctgcatgatgaactgtttgtcttgctgttattttatcccccatcatttccatcgtttttttagtaggccctataaacgctatgccttgttcctcaacggtttgagcaaattttgttgattctgataaaaagccatatcctgggtgaattgcattagcaccagtgatttgtgcagcagatatgatgcggtcaatatttaaataactatctaaagcattagcttccccaatacatatagcttgatctgctaaatgtacatgcaagctttgctcgtccccttttgcataaactgctacagtttcaatcccatattctctgcaagctcttataatccttacagcaatttcacctctgttcgcaattaaacaacgaagcatttacttaccccctttacttaatacgtaccaaaacttggtcgtattcaacatttgtgccatgatcagctactatttcagtaatttctccagcaacatctgttgttacctcgtttaatactttcatcgcttcaacatatcctataatatctcccttgttaactttgtcaccgacattcacaattggttcatttaattctttactatcttgtaaaaagaatgtacctaccattggtgatttaatgtcatgataatcatttgtcgaaacatcggagttatcattcgcttttgaagctgtcaaatcattattgttcatactttgatttgattgattactgtgtgcagccaaatgattcgagtcagtgaagtcaatttctatttcatcttcaaaatttttatatttaaatttcttaacatcattttccttcactaatttgattatttgttcgattttttcaatattcattttacaaatccccttttaaaattgttgctaattttttcgaagtatgtcgcaagctagatgtttcaaaaattggagtcttttgatgactcttaagaatttcattaaacagagacatttgttcccgattcttatctacagcttcttggaatgatatccatttaaattgaattgtatcttgtggtttcatctgtgctaactttggcagatcaaatttgcatacagttgcaattttggtataaccacctatcgtttgtttatcattaagcagaataataggttgaccatcatttggtacttgaacactaccaagagcaaccggttcagaaatgatatctgcttgattaattggtgcaacgctgtcaccttccaaacgatagcccatacggtctgattgttcagtaattaaatatggatgatttacaattttcgctctagcctcttcagaaaatgcctcgaattgaggtccttgaagaatgtgtataatattattttctggcaataaatcgtcctgtaaatgaatagtctttccaatgttttctttaaagtcattatttattttcactgttattacatcattagctaataactttctacctttgaatcctcctatactgcttcgggtatgtgttgcataactttcagcaatagaaggtacgttgatagaatgaccaaaagtaagataaccgcgtgcacctttggttatagcacctatttttaaaatgtcacctttctcagctaatatgacagaattcattgatatagttttattatttagcgaagcattaatactaccaccggttataacaaatgtattttgcgtattaaattgaatggtaggaccaatcaaagtatattcaatcgctggaccatcattgttaattaatgactgcgcaaccttaaaactaaattgatccatggcacctgcgcctgaaaatccaatatgttcataaccttttcttcctagatcttgtaccgttgaaaagagacctggttgtaaaatcttaattgacattttcaatcaccacccagtcatcaacattaaagttgccatctgatatatctctttcgatttgtataaatttctgttcatctattgcataaaattgtatccattctcctgcttcgtacattgacattggttcacgctcgctgctaaatacttttaacggtgtgcgtccaataatttgccatccgccaggagaatctgatggatatagtcctgtttgattattcgcaatacctacagaacctgcatgaatttttaaccttggctgattacgtctaggtgtatgtagttgttcatcaagtccgcctaagtatggaaatcctggcataaatcctagcatatatattaaataaggtttacttgtatgtttttcaataacttgctcaacagttattcgattatgctttgctacttcttcaatatctggtccatatgtaccaccatattgaacaggtattttaataatacgattggtttgattcacagcatgaacatttttttcattaaatttgttaagttctaaattttcaattaatttagaagatgttatagcttgttcatcaaaatatattagaactgctcgatacgaagggacaatatcttgaatttctaatatttctttttctcgtatccaccgtaccattgctgtgacattacgatatgtctcttcggatattttattttcaaaataaatcataattgtctgctcgttaataaatcttacatccactttaaatccccctttgtattgcaataaaccagtattgaataccttttcattgtatcattgagaagcacaagttgtttaataagtaattcaaatcgcatacaataacaaatgataatcaatttgttttctcggaaatattttgcttttttaaaatggagtagttaatattgtaactcttacactaatttaggttctgctatcattcggtctgatggaaaatttttacttttcatctgtccgattttttgattttgaatataaaaaagcacgaccgaagtatcattaacacacttcaatcgcgcaattaaacaatctatttgatcatttattggatattaacaatttttacgttcatttcgccaccattaggtagtggaacacgaacttcatcatctaaacctttaccaattaacgctttagccattggtgattcatttgaaatcttaccattaaatgcatctgattcagctgaaccaacgatttgataactttcctcttcatcacctggtaattctacaaacgttactgttttaccaattttaacaatgttgttatctccagtatcttcaatgattaatgcatttcttaacatatgctcaattctttgaatatcttgttcgatgaatccttgttcatcttttgctgcatcatactcagagttctctgataagtcaccaaatgaacgtgcaactttaattttctctacaacttcaggacgcttaactgtttttaattcttcaagttcacgctctaatttttcaaaaccttcttgagtcattggatattgcttttgattttccatattgtcatcttcctttactgaattatactattgcttgctaactaaagactgaatttttgttgtcataatatctattgcaactttattgctcccaccttcaggaataattatatcagcatatttcttagtcggttcaataaattggtcatgcataggtctaacaacacttaaatattgattgataacagagtccattgaacgcccacgctctttagtatctcgtgttaaacggcgtaatattctcaagtctgcatctgtatcaacatatattttaacatccatcatatcacgtaataccttattttctaaagcgaaaataccttctacgataataacatctttaggtttaaaatcaatggtaatgtcacttcttgtatgactagcataatcatatgtcggtacttctactgctttaccatttttcaagtctttaagattttcaattaataaatcattatcgaatgcaaatggatggtcataattggtttctaggcgctcgtcgaaagtcaagtgcttttgatctttataatagtaatcttgagcaagtaaagcgacactatgaccttctaagtttttcataatttcgttagttacagttgtttttcctgagccagatccaccagctatgccaatgattgtagtagctttcattagccaatttcctttctcatcatgttgtttggatatatcgggcgatccactttaatttgaacgatttgtaatggatggcgcgccgcgtctaagctgttaccttcttcatcataaattgcttctactacttgtgtaaatgtttcaatttctggaccaaagaattctatttcttgacctggtttaaagttatttcgttgttgaatagtcgcaatttttgtatcttcattatagtctaataccaaaccacaaaaatcaaatggtgattttttagattgttgttgaccaaacatctgttcttcataaccaggtgttccctcaaagaatgctggtgcagtgtctctatttgcacatttatctaactctattaaccattccggattaatcttaaagttgtcaggatctgccgcatacgcatcaatgactttacgatatactgagacaactgttgcaatataatgaattgacttcatacgtccttcaatttttaatgagtccacaccaatatccatcatttgaggaattgattcgattaattttaaatctttaggactcatcgcaaacggtgtaacttcaccttgattataaaatacatcaagttcaccattatcatcaacttctaataattcataatcccaacggcaactttgacagcaaccgcctctgttggaatcccttgcagtcatatgattacttaatgtacatctacctgaataggcgatacacatagcaccatgaataaatgcttcgatttcaatatctactttttccttcatttcacgcatttccatcgcgccggtctcacgtgctaatacaacacgatccaatccttcttctttccaatattctacagctttgtaattagaaagtgattgttgagtagataaatgaatttcaagttttggcgcaacttctttacatgtttcgataattaaaggatctgcaacaatgatacctgtcgcaccagtcttttccaaattacgcaaatatgattctagaccttcaatattctcatcatgtgcaataatatttgtcgtaacataaattttggcaccgtaacggttcgcaaattcaacaccttcagctatttcttccatcgtgaaattatcagcatttgaacgtaatccatattcttgaccacctaaaaatacggcatcagcgccataatgtactgctatttttaacttttctaagtttccagcaggtgctaataattctggtttcttcataactgttttaggagttgatttaatctcttctattgtcttcatgattaacctccttaatatactgtttgtttatataagaaaccttcgtcaaatggtcgatgatcaggttgaatttcttcaattggatcaatcaacataaatttctcatcttcatagatttcaggatcttcattgtacaaatctatcgcttgacgatactgttccgttaccacattaatatattcttccgtttgtagaataccatcgattttaaatgaatctatacccgcctcaaaaaatggtgctaattcttcaattaaacaaatgtcgtttggtgacataatgtgcgtaccattgtaatcttcgtaaactgggtaattattttgtctttcttcatcataaagtaataaagattgttcatcattgcgacgttcaattttcatttggcgatcttggaacgtataataattgcctagtagcatacgctttgattggaacatacaagtcattccttgaacttgcacctcaatttccacatttgaattttcttttatattaataatttcatccaaattcagctcacgtgctaagacagctcttgatgcgcctcttttaccccagtaattacattgaaaatgattagttactaacgtctctgcattccaatgaagtggtattggattttcttgcgccttcacatacattactactgctggatccccgaaaataattctgtcaactcgtatttcatgtaaaaaattaatataatcttctacagcatctaaatgataattatgaaataatccattcactgccgcatatacttttttatcgtttttgtgagctaatgcgacagcctctgtcatttgttgtctattgaattcccctggaagtcttaaaccaaacttttgctcgccaattacaaaagcatctgcacctaaatcaataagtgtttccatatggcttaatgacttgggtgtgacaagtaattctgtcatagtcattctcctttaattgaaatcgctaatccatcgtctatatttaaaaaattcgttgtatatcctggttgctttattaaccactcattataatcttgaacctttttaaccatttgtcttacatttctcgatctaacaatcccaatatccgatacaaaaccgtgatataaaacattatctgtaattacgagaccttggtgctttaaaagtggtgtatatatttcaaaaaatttctttgattgcgcttttgctgcatcaataaatatcatatcataaactttgtcatttacattttcaaattgctctaaagcattaccttcaataattcgaacctggttttcaaaatgataagtagctaaattttgtttagcatattgaatcatcgtttcattacgctctatcgttgtgacatgaatgtcatcagatatagaagcgaattgcatagaactatagccgattgctgtaccaatttctaaaatatttttaacattattcatacgaattaattgcttaattaaatctaatgttaaacgatctacaattggcacttcatttccctcggcaaattcacgcaaaacttcgattgaactattttgatgttgatgtaaatctattaaatattttttatttaggtcatccatgttttaaacttcctttatgtaaaataagtcaatatgattatgacaataaaataaatcagccttcacaattgattataattttgccaaccaattaaatgactgatttcgtgttagacgcaaagctattttatttatagaagcgaatcattcatataaaatttaactttagatattttaccatattttcaataaaattataagcgttaattatttatacattgcttgacttaaaaaaatactcttgcctccccatcttaaggttagcaagagtaaaatctttttaattattcttccatttcagtatttacaacttcttcaatcatgtcccattcttcatcagtttcgattggtactaacttaccaccgtcacctgactcatctggttcattgatcattggtacaagctcaatcatatcgtcttcatctgattgagcaccttcttcagctaagataacatactcttttttgaattcaggatgataaaattctaaaacttttcggtataaaacttcatttccctcttcatcgaataaagttaataattcttcttcgttattaatttctagttgtgaatcatgattatgttcagtcatagtaaaatctccttttaatgtagtgaatctaaatagccttgtaaaataaataccgctgccattttatcaatcacttgttttcttttttgtcttgaaacatctgcttctaataatgatcgttcagcagccattgtgcttaatctttcatcccacatcacaatctcaatagaaggataagcttctaataatttttctttatatgttaacgaagcttcgcctcgaaatcctattgaattattcatgtttttaggtagtcctattacgactgtacccacattatgttttttaataatgtctactaattggtcaatacctaattcattattttcttcattgattcggagtgtgtctaatccttgtgccgtccaacccattatatcactaattgcaattcctaccgttctactaccgacatcgagtcctaaaattttatgttgtaacataaattatttattttgctcttttaaatagtaagaaacaagctcttccataataacatctctatcaatatgacgaatttgatttcttgcttcattttggcgtggaatatacgcagggtcacctgataataaataacctacaatttggtttacggcattatatcctcgttcatctaatgttcgataaacattatttaaaacatctcttacatcttgcgttggaagttcttcatagtcgaatttcattgttttatcaaagttttccatttgcgacactcctttaattacaaatataactcactatcatcatacaatattatggctttaaattatagatttttaatgtaatctttaataaagcttaatgattttgagatattttcaggttgtgtaccgccaccttgagccatatctggacgaccgccacctttaccaccaacgattggtgccatttgtttgataagatcaccggctttaacgttatttgttaaagatttagggacagttgcaaccatcgatactttatcatcaacattacttgcaagaatgataattgtatcttgtagtttagatttaaaatcgtccattgtcgagcgaattgctttcgcatttggtacatccacttcagtaaccaatactttatagccattgatttcttcaacttgatcttcaatattacccattttaagtgatgtgatttctttgtcacgttgctctaattgttttaataatgctttttcttcatcttgtaattgtgttaacttatcgactacttgatcatcagatttcactttcatctgtgatttcatcgtattaaatttctcttgaatatcttctaaatataagaaagctgctttacctgttaatgcttcaatacgacgcacaccagctcctgtacctgactcacttactattttgaataagccaatttcagaagtattgcggacatgaataccaccacataattcaattgaaaatggtgccatatttactacacgcacaacatcaccatatttttcaccgaataatgccattgcgcccatttctttagctgaagcaatatccatttcttgaatgttaacgtcaatacctttccaaatttcttcatttactaagcgttcaacttgatcaatttcatcattagtcattggaccaaaatgagagaaatcaaaacgtaaacgatctgcttctactagtgaaccagcttggttaacatgatcacccagtactgatttcaacgctgcatgtaataaatgtgttgcactatggttcttttgaatgtcacgtcgatcattttggttcacttcagcagacactgtagcgccaacatttacttggccaaattgtactactcctttatgcaagttttgaccatttggtgctttggttacttcactaacagcaatttcaaaattgtcattataaacaatacctgtatccgcaacttgtccaccactgactgcataaaatggtgtttccgttaacatgaagtatactgtttcacccgcttcaacttgtgaaacttcttcaccattatatatcaagtgtgttagtgttgtttgagctgtcgcagtatcataaccaacaaaagtacttgcagatgtaatatttttcaatacttcactttgaacttgcattgattgagaattttgacgtgcttgacgtgcacgatcacgttgttgttgcatttctgactcgaatgttgtcatatcaactttcaatcctgcttgaactgctatttcttcagttaattcaattgggaacccgtacgtatcatacaatttaaatgcatctttcccattaatttcatttgttgtcgctttagcttttttaattaattcatttaaaatcgctaaaccatcttctaatgtttcatggaatcgttcttcttcagactttataacacgcttaatgaaatctgctttttccttaacatttggataatatggttccataatgtctgcaacaatatcaacaagtttgtacataaatggctcattgattcctaacgtttgactaaaacgaacggcacgacgtaacaatcgacgtaatacatatcctctaccttcattggcaggtaatgcaccatcagaaattgcaaatgcaatcgtacgaatgtggtcagcaattactttaaatgccacatcttgttcgttgtttactaaatattgtttacctgatactttttcgatttcattcattataggcataaataaatctgtttcatagttagtacgtacattttgagaaactgaggccatacgctcaagccccatgccagtatcaatgtttttattaggtaatggtgtgtaactatgatctttattatgattgaattcactaaatactaagttccatacttcaagatagcgttcattttctccacctggatacatttcttctgccggatcgtcttgtccatatgcttctccgcgatcatagaaaatctcagtgtttggtcctgaaggcccttcaccaatatcccagaagttaccttcaatgcgaataatacgactttcttcaagcccaatatctttatgccaaatgttgtatgcttccatatcttccggatgaatcgtaacgtacaatttatctggctccatacccatccatttatcactcgttaaaaattcccaagcaaattcaatcgcttcttgtttaaaataatcaccaattgagaagttacctaacatttcaaagaatgtatggtgacgcgctgtgaaaccaacattttcaatatcatttgtacgaatagctttttgagagtttacaattcttggctttttaggtgtttcacgtccatcaaaatatttctttaatgttgctacacctgaattaatccataataatgtatcatcatcaattggcactaatggtgcagaaggttcaaccatatgtcctttttcaacaaagaaatctagatatttttgtctaatttcactcgcttttaactttttcatcttttacacatcctatttactgtttttaaattaccattccataaaaattgatgacacagatagtcgatttgaaaaactagtataaatcaatatcattttttattattaaaaaataaaaaacgcccatcctcaaaagggacgaacgttatcgcggtaccaccctagttataaatgcaattcaacacatttatcactttaaatcgactatacagttgtgcataaagtagcgttcactaatgtttgttgtacttttcaccaaccagtacatctctgataaacaaatcattaactactcatctttatacgaatttaattctattttagttacatttacgcttgttgtcaacgttctataaagtcatacggcgtgatttctcccatattaatcattgggtcaattttaaacattgtagcttccgttaatacatttgtatctgtttttgttgaatcagacataacttcttcactatcattcgatgacattggcgcttctacttgatcatctattgtcgtttgtgaagctcctgtatcattagttgctgtgttttccagcatttcttcatcttctgaattaaaataatttttcaacaatgtacataattgtgttaaacgcgcttgaccatttgtttttaatccaatatcaaatgcttctggatcaccaagtagaactaaactcgttttcgctctagttaaaccagtatataatatcggtctttgtaacattctaaaatactgtttaacaataggcatgataacaataggaaattctgaaccttgtgatttatggattgatgtacaataagcatgtgttaattccatcatatcttgtttcgtaaatgtaatttcattaccttcaaaatccacaacaagtacatctttattaagggcattttctttcgcccaaaaaataccaacaataactcctatgtcaccattgaatatattatcatttggcctattaacaagttgtaatactttgtcaccttttctaaagactacatcaccaaactcaatttctcgtgtgtctttctttttagggtttaaaatatcttgtaaaacttgatttaaacgtttaataccggcatttcctttatacattggtgcaagcacttgaatatcagccatagtataccctttattaacagcactagtaactaccttctctacaactgttggtatttggtttgcctgacagttaataaaacttctatcatgaaaacgctgtgtaatatcaattttctgacccaacttcattcgatgtgctaattctataatgcttgaaccatcttgttgacgatatacttcagtcagattaactcgtggtatagctttcgattcaattaaatctttaaatacttgaccaggacctacagaaggcaattggtcctcatcacctacaaatatcaattgtgcatctaaaggaactgcacttaaaaattggtggaacaaccaagtatctaccatagacatctcatcaatgattatgagtcgtgcgtttatttcattttctaatatatcctctggctttgtgtcttgattccaacctattaaacgatgaatcgtcatagcttctaatccagttgactcttgtagtctcttggacgctcttcctgttggcgctgctaatacaactggataatcatcattgacataatcatcataatctaatgataagccatgaatctcagcatataattcaacaatacctttaattactgtcgtttttcctgttcccggtccaccggttaatagcatcaccttagaattgatagccgtttgcaaagcttctttttgtgaagctgcatagttcacttgattcgcatcttctatttcaccaatatgcatttgtaaatctgactgttcaatttctgtaagtttatttgtatgcgtctttattctgaataagttttgaacacttttgatttcagaataatacaaacttggaattgcaacttgttcattgtcaataattagtcgtttttcctcatttaagtattgcaacatttcgtctaatttttcaggttcgatgacctcttcatcttgataatttaatacatcaaccgttaaatctataacaacattgataggcaaatatgtatgtccctgtttaatacattcttcttctaacgtatagagcaacgcagcttttaatcgttcattatcgttataagcgataccaatatttctagcaagttgatctgctttattaaaaccaatacctttaatatcataaatcaattgatatggatttcgatctaaaatagtcagtgtatcgccgagataaaactgataaattgccattgaaagtttaggaccaaaccctaaatcatgtaaacgaatcattattttttcagattcttgatttgctgaaatttgttctgcaatttgtttctgtttctttttagataatcccgaaactttttctagcactgaatggtcatctaatatatcatttatcgcattgtcacctaatgtattaacaatattttgagctgtctttttacctacacctttaaacaaatcactagataaataacttataattgcttctttcgtttgtggcatttctttttcaaaagtctctgcttttaattgtttaccataacgtggatgatcaacaacttgccctttaaatgtgtagacatcgccttcaacaatattcggaagaaaccctacaacagttggcattgtatcaaagtcttcatttgtttcaatagtatctactttaagcactgtataaaaattatcactgttttgaaacaatatcgcttcaacagtacctttgatcattgaataatcaaatagtgtagggtctgacatgttactcctcctctttcattttagtgaatgttttcagcgcatgctgacttaataagtgtttagggtcgatagtcacagcttctttaaaatgagttattgcttcatcaatatcttcatttttcataaataacgctaagcccaaattgtatcttgcatcaacatgatttttatcaatcgttaatacatgtttaagttgagttatggcttcattaaacatttctaattgacataatacaagaccatattgaaattgaacttctgcatctttgtctttatctagttccgcagcagtcattaaatacggcaatgccagcttaaatgattctaactgattaaacgccataccgatcatataattacaatcaacttgttcaatctctgtttgtaatgcttgttgatataatttaatagcttcttgataacgttgctgattataatatacatttgctagattataaaatacgacgccattcttcggatctattgttaaagctttttggaaaaaacgctctgccttttcaatctcattcgcatcagcaagtacaataccagcattaatataattttcaataattgtaggatcttcttcgatatttccgaacaatgcttgtaacgcttcttctatttttccattttgtatgtattgataaattgtttgttgatctatcatttacgaacctcatttctcatcaattataacatcttgataaattgtatgtctcgaatcacttaacaacgaataaaatataatctaatatcattttcattcatgaaaaagcgggaatggaatagaaatgctaaagaaccattaacggtttattatgtaatggttcttccacattagccaccactattatgtacttaaaaataggaatacataattagattcatgcatagggagtgggacagaaatgatattttaacaaaattaaattcgttatccccaacttgcattgcctgtagaatttctttacgaaattctctgtgttggggccccatccccaacttgcacattattgaaagctgacttttggtcagcttctgtgttggggccccgtccccaacttccattgcctgtagaatttctttacgaaattctctatgttggggccccgccaatataacattgtagagcctaggacattgtgatgtcccagactctatcatcatgaattattctcatcaaaaactgtctttcgtcattttcgacgttgaaacttcaaataagtaatttattgttgccattgtttatacaacataatttaattgaccttcatttttgaacacatcgtcaattgttgcaccaccaagacacacatcaccttgataaaaaacaactgcttgtccaggtgtgattgctcttactggctcagcaaaagtaacacgtagtgcatggtcgttttcacgtttcacaaaaactttcgtatctttttggcgatatctaaatttagctgtacattcaaaaccttgatctaagtcattatcttctggatttacaaatgaatagtctgaagcaattaagtaatcactgtataatgcatcgtgatggaatccttgttctacatataaaacattatcttttaggtttttaccgacaacaaaccaaggatcgccatctccacctatacctaatccatgtctttgtcctattgtgtaatacatcaaaccactatgtttacccattttcttaccatcaagtgttatcatatcacccggttgtgcaggtaaatattgtgataaaaatgttttaaagtttttttcgccgataaaacaaatgcctgtagaatcttttttcttagcagtaacaagtccttgttcttcagcaattcgacgcacttcactcttttcgatgtcgccaattgggaacatcacttttgaaagttgttgttgagataattgattcaagaagtatgtttgatctttattattatctacaccacgtaacatttcaacatgaccatcttcatgacgatgtatgcgtgcgtaatgtcctgttgctacataatctgcacctaaattcatcgcatgatctaaaaaggctttaaacttaatttctttattacacataacgtctggatttggagtacgaccttttttgtattcatctaagaaatacgtaaagactttatcccaatattctttttcaaaattaacagcgtaatatggaatgccaatttgattacacacttcaataacatcgttgtaatcttcagttgcagtacatacgccattttcgtcagtgtcatcccagtttttcataaatatgccaatgacatcataaccttgttcttttaagacgtgggctgttacagaactatctacaccgcctgacataccaacgacaacacgtatatctttatttgacaattatgactcctccttaaatttaaaatatattttatgaatttcagctacaattgcattaatttcattttcagtagtcaattcgttaaaactaaatcgaatcgaatgatttgatcgctcctcatcttcgaacattgcatctaaaacatgcgacggttgtgtagagcctgctgtacatgcagatccagacgacacatagatttgtgccatatccaacaatgttaacatcgtttcaacttcaacaaacggaaaatatagatttacaatatggcctgtagcatccgtcattgaaccatttaattcaaatggaatcgctctttcttgtaatttaactaaaaattgttcttttaaattcattaaatgaatattgttatcgtctcgattcttttctgctaattgtaatgctttagccatcccaacaatttgcgcaagattttcagtgcctgcacggcgtttcaattcttgttcaccgccaagttgaggataatctagtgtaacatggtctttaactagtaatgcaccgacaccttttggtccgccaaacttatgagcagtaatactcattgcgtcgatctcaaattcgtcaaacttaacatcaagatgtccaattgcttgaaccgcatcaacatggaaatatgcatttgtctcagcaataatatcttgaatatcataaatttgttgcactgtgccaacttcattatttacaaacataatagatactaaaatcgtcttatctgtaattgtttcttcaagttggtctaaatcaatagcacctgtatcatcaacatctagatatgttacatcaaaaccttctcgctctaattgttcaaaaacatgtaacacagaatgatgttcaatcttcgatgtgataatgtgattacccaattgttcatttgcttttactatgcctttaattgccgtattattcgattctgttgcgccactcgtaaatataatttcatgtgtatctgcaccaagtaattgtgcaatttgacgtcttgactcatctaaatatttacgcgcatctcttcccttagcatgtattgatgatggattaccataatgcgaattgtaaatcgtcatcatcgcatctactacttcaggttttactggtgtggtcgcagcataatctgcataaatttccatgtttggacactcctcacaattttatcaatgttccaataatagcaccttacatactatttttctacttttctgtttaactttatttataatgtttttaattatattttaccattttctacacatgcttttcgataggcttttttaagtttatcgctttattcttgtcttttttataaattttagtatttgcagatatttttttatttgtaaaatgtaacgtactattattttggttatgagcaatttaatatttatctggttattcgattggtatacttcttatatcataaaaaaggaaggacgatataaaaatggcgattaaatattcagcattaaaccttgtccctattcgagaaggtgacgatgaacaaacagcaattaatgatatggttaatctcgcacaacatttagacgaattatcatatgaaagatattggattgctgaacaccataacgctcccaacctagtaagttcagcaactgctttattaattcaacatacgttagaacatacgaaacacatacgtgtaggttctggaggcatcatgttacctaatcatgctccattaatcgttgcggaacaatttggcacgatggcaacattatttccaaatcgtgtcgatttaggattaggacgtgcacctggaacagatatgatgaccgcaagtgcattaagacgagatcaacatgatggtgtttataaatttccagaagaggtttcattattacaacaatatttcggccctgctcaccaacaagcatatgttcgtgcttatccagcagtaggtaaaaatgtgcctttatacattcttggttcttcaacagattctgcacatttagctgctcgcaaagggcttccatatgtgttcgctggacattttgcacctcaacaaatgaaagaagctatcgaaatttacaaaacgttatttgaaccttctgatgtattagacgaaccttacgttattgtatgtttaaatacaatcgttgctgaaaatgatgacgaagcacaatatttagcttcatctatggcacaagtaatggttagtatcactcgtggcagaatgcagcccgttcaaccgccaacacatgaactacaaaatatattaacgccgagagaatacgcgatggctatggaaagacagaaaatatcattaataggttcagaaaatactgttcaacaaaaaattcaagattttatggaaacttatggtgaagtcaacgaaattatggcaataagttatatttatgataaagatatgcaattagactcttatcgtcggttcaagaatgttataaatcagataaatgaaaaaaacactttataatgtgataaataaactaagtgaaagtatgtatccataatattaataaaaatatacagtaacagcattttgaatgaaagatgtctttattgttcaatcatttattttagtaatgattcaaattcacttaaaattctaatgcaaatatgaaagcgccccttcaactttacactgtgtaagtgtttatttgatggggcgctttcaaaatattgaaaagcatatccaaaatttaaagaaatttatttctctttatcttcattttcttttttctcttcgttattcgatcctgtatattcatttatcttatcttttacatttttaacttgttcattatcgctatttttaaatttttctactgcgtctttagctttatccataaaactcatattaatcgctcctcttatatttgattagtttaattgaacttattttttaagtttatcaattgcatcagttattttgtttttagcattttcaacaacttcttttgctttaccagtcgctttatcttgctgaccttctttttctaattctttgttatcagtaacgttacctactgtttctttaacatttcctttaaattgatcgaacttactttcgtctgccatagtgaaacctccttggatgtatatatttatataccactaaggaggttcgctaaacattataatattaagtttttatgttatagtatagtatttatacgattaaatataaaacatgtatccgtctaaatcttcacttgtatctacatattccgctaaatatttcaatgttgtattatctaaaacatctctcactgcatctctcatgcgaatccatagttgtttttgcgcaggtggttctgattcaatactttcaacaaatgtaattggaccttctaacagtcttataatatcccctgctgagatttcttccgctggtactcttaattggtatccacctttagcaccgcgtacacttcgaattaaccccgcatttcttaaaggacctacaagctgttctaaatataaatcactcaaattattttcttcagcaattgactttaatgatatacatccttgcccctcttttttagcaagagaaatcatcaatgtaagtccatatctccctttagtagaaattttcattgtataacctcacttaattcgaatattgatattcccattttagcattttttgagttaagatagtataagaaaggtgtgacaaatgtgagtacagaaccattagcatcgagaatgcgcccaaaaaatatagatgaaatcatttcccaacaacatttagttggaccaagaggcattatcagaagaatggttgatacaaaaaaattaacttcaatgattttttatggtccacctggtataggcaaaacaagtattgccaaagcaatttcgggcagtacgcaatataaattcagacaattgaatgctgtaactaacactaaaaaagatatgcaacttgttgttgaagaagctaaaatgtctggtcaagttatcttgttattagatgaaatacatcgactagataaagctaaacaagactttttattacctcatttagaaaatggcaaaatcgtcttgatcggtgctacaacttcaaatccttatcatgctatcaatccagcgattcgttcaagagcgcaaatttttgagttatatcctttaaatgatgaagatgtgcgccaagctttaactcgtgcaatagaagatgaagagaatggtttgaaaacatatcaacccaaaattgatgaagatgccatggcctacttttctacacaaagtcaaggtgatgttcgtagtgcgttaaatgcattggaattagctgtattaagcgcagataatgacaaagacggttatcgacatgttacattgcaagatgctaaagactgtttacaaaaaggtgcatttgtaagtgataaggatggtgacatgcattacgatgttatgagcgctttccaaaaatctatccgtggtagcgacgtcaatgccgctttacattatttagcacgattaattgaagctggagatttacctacaatagttcgacgattacttgtaattagctatgaggatataggcttagcctcacctaatgctggtcagagaacacttgctgctattgaatcagcagaacgtctaggtttaccagaagctagaatcccactaagccaagcagtaatcgaactatgcttatcacctaagtcaaattcagcaatgagtgccattgatagtgcattgtccgatattagaaacggtcatgtgggtcaaattccaaaccatttaaaagatggacattatcaaggtgctaaagatctaggccgatctattggttacaaatatccacaccaatatgttaatggctatgtttcacagcaatatttacctgataaactaaaaaacaaaatttattacgaaccaaaaacgacatctaaaagtgaacaacaactcaaagaaatatataacaacttacttaaacaaaggccgtaaaaataagattaaatcgattacctttgatattttagctataatcaaatcaaaactgactagtacacgaggcatattctactatgcttgcgaactagtcagttttagttttatggtgtggttacacttgccttacgttgaaaattatccctttcaaaattaattattgccctttgtctttaatgcgacgaactggaatatcttttaatacgtcattcaccacataacttgcacaaattaatccaacaacacttggtacaaaggcatttgaagaaggtggcatttgtccttttcgattgatagcatttttatctccaactatatcttttacatcttctcttatgacaattggactttcatctgaaaatacaactggaatccctttacgaattcctagttttttcaatttttgacgaataattttggccattggatcggtatgtgttttagagatatctgaaattgtaaaacgtgttggatctgttttatttgcagcacccatactggaaatcactttaatccctcggtcaagacactctttcattaagtgtactttgtacattattgtatcacttgcatctacaaaataatctatatcgtaattatcgaaaatttcttcatatgtctcttctgtataaaacaaatgtaaaggcgtgactttacaatctggattaattaatttaatacgttcttccatcaaagaaactttactttgtcctactgttgtagttaaagcgtgtaattgtctgtttacatttgtaatatcaacatcatctttatctattaatataatatgaccaatattcgttcttgctaatgcttcagcagcaaatgaaccaacacctccaacgccaagtatgacaacagtttgttgcttcaataaatctaaaccttgttgtccaatcgctagttcatttcttgaaaattgatgtttcattattttacctctttcactgatttatacataagtacatagtaacttaaaattttatgtttagcattatcgctttgattatttttccaaaattcaacgaggaaacatttattaaaccctattaaacccaactaattctttattaaaaacttaaagaaaagcataaaaatacgcaagacaaagtcttgcgtatcgatagagtccgtattgccgtagttataatagcttgatcattcggcctgttatatacaggtgggtgccctgtttcttgttttgtacgtccttcatataaggcgtgtacgctgcaagaaaacccattgggctcccttgatcaaagagtgttaggcccaaattaaaaagcaaacttacgaacaactcagatgactatcttatgatgttatattaccacataattaaaattaatgaaattataacaaaccaaagtttattgattttttaaaatttagtgacgaattcgcaaagaaagttcttctaattgtttatcagaaacttcaccaggcgcattcgttaataaacatgtagcagatgctgttttagggaatgcgattgtatctctcaagtttgttctattagtcaataacatgactaatcggtctaatcctaatgcaataccgccatgtggtggtgcaccatatttaaatgcatctagtaagaagccgaactgttcttgtgcttgttctttagtaaatccaagaacttcgaacattttttcttgtaactcaccatcatgaattctgattgaaccgccacctaattcataaccatttaatactatgtcataagcatttgcctcagcttcttctggcgcagtgccaagcttagcaatatcagcttcttttggagatgtaaatggatgatgtgctgcaacgtaacgtttcgcatcttcatcatattctaataatggccaatctgtcacccataagaagtttaattttgtttcatcgattaaacctaattctttagctaatttgacacgtaatgcacctaaactttgtgcaacgacatttggtttgtctgcaacaaacattactaagtcaccagcttcagcaccagttaatgtaagtaatgtttcaacattttctgtttcaaagaaacgtccaattggacctgtcaaaccatcttccacaactttaacccacgctaatcctttagcaccatagatgtttacaaattctgttaaagcatccatatctttacgagtatattgttcagctgcacctttagcgacaattgctttaatttcaccatcattttcaacagtatctttaaatactttaaagtccatatcacgtcctaattgagaaacgtcaattaattccatttcaaaacgtgtatctggtttatcagaaccatagcgacgcatcgcttctttatatgtcatgcgtgggaaagcgccattaatttcaacgcctttaacttctttaacaacttttttaagcatttcttcacccatttgcatcacatcttcttgatctacaaaactcatttcaatatcgacttgtgtaaattcaggttgacgatctgcacgtaaatcttcgtcacggaagcattttacgatttggtagtatttgtcaaatccactaatcatcaataattgcttaaataattgtggtgattgtggtaatgcataaaattcaccatcatgaacacgagatggtactaaatagtcacgtgcaccctcaggtgttgacttcgttagtactggtgtttcgatgtcaaagaacccttcatcatccaaatattgacgaatagaacgtgtaatttgatgtctcattttaaatgtttgcgctaactcttgacgacgtaaatctaaataacggtattttaatcgaatattttcatcaacgttaacattttcttcatttatagaaaatggtggtgtctcagatttattaatcactttaatatttgtaacttgtacttcaacttggccagttttaattttaggattaactgtttcagggtcacgcttcgtaactgtaccttgaacttctacaacatattcagaacgtactgtttcagcaattttcaatgcctcttctgaaaatgcaggattaaacacgacttgtacaattccttctctatctcttaaatcaacgaaaatcaatccacctaggtcacgacgattgttaacccatccttttaatgtaatttcttgtcctaaaaatgcttcagtaactaatccacaataagttgttctcttactcatattttaacgccctctctacttcttaaaatattcgactaatgcgtctaattcaattgtttcagattcaccagttgtcatatttttaacatcgattttattattttctaattcttgatcaccaataacgattgtaaacttggcacctaaacggtctgcttgtttcatttgtcctttaattttacgctgtaagtagtctttatctgctttaataccattatgtctcaaatgatttaataacttcacagcatatcgatctgcttgatcacccattgtaacaatgaataaatctaagttttcttcaatatctaattcgataccttcttcttcaagtgcaagcaataatcgttctatacttagcgcaaaaccaatacctgtttcacttggaccatctagcaattctaataaaccattataacggccaccaccacaaagcgttgtaatggcaccatcatagttagggttatccatcattaattcaaatgctgtatgtgtataataatccaatccacgaactaagttaggatcttcaatatatggaatacctaaatcatctaaataagcttttacttgttcataatatgcctttgattcctcatttaagaaatcagtgattctaggtgcagtcttaatcgcttctttatcacggtcaactttacaatccaaaattcgcatcggatttgtatgcaaacgtgattgacaatctgaacaaaattcatgaattactggttcaaagtgtttcactaacgcttcgttatattcttttcgagacgccatatcccctacactattaataacaagctttaaatgttttaatccaaatgattgataaatatgcataaccatagctaatacttctgcatctacgctaggattttcagcaccaatagcttctacaccaaattgattaaattgacgatagcgccctttttgcttacgttcatatctaaacatcggtccattgtaataaagtttaattggttggtttggattaccttgcattttatgttcaatatatgaacgcacaactgcagctgttccctcaggtcttaatgtaatacttctatcgcctttatctttaaatgtatacatttctttttgtacgacatcggttgaatcaccaacacctcttgcaaaaagatctgtactttcaaaaattggtgttcttatttctttataattataaaatgtcattaattcatctaattgattttcaatgtaacgccatttctttgaatcttcaggtaaaatatcctgcgtccctctaggtattttaatcattttgacatctccctcggcaaactattttatttaattacctttttaaaactaaaactatatacgatcacttaactttgcatgataaatcataattttaaaagcaaaagaaaaagcccttgcacagcctgaaactgcacaagggacgaatatccgtgttgccaccctcattggtttaaaaaacatgcctaattgtaatcatcattactttttataagcgtgcattaaataaacccactcaaaacgtttaacgtacgtttaacggctttacttttcataaagcacctcttcttgtgttcaatgtatataaactactcagcataatctttcagtctatggattatattcctacacaatcttagttagattgctacctatttcatttaccatttcaagaatactaacggttttagttataaaattcaatatcaatgataactactttcacatatttttgcaagccctacgcagaaaaataaattttaaggccatcaacaattgcttgttctaaaatttgtctatgtaattgatctttaatcatcgtttcatcagttgggttactaatataacctaattctaataaaacagcaggaacttttgtttgtcttaacacttgataattttcttgtcttgaaccgcgattagaaagtagacctttcttctgaatcgtagcgtctaacgtatctgctaaagctctttgattatcatgataccaataaactgtcattccatttgcattagatgattctaacgcatcattatgtatactcaaataggcatcgcctttgatatcacgattttctagtgaaacatatgtatcgtctgttcttgtcatcttaacagttgcgccttctttttctaaagtacgctgcaattcttttgctgttttcaacgtataatctttttctaaacttttatatttagtattgcttgaagcaccctggtcactacctccatgaccaggatcaagcactattgttttaccttgcaaaggatttttctccttcgtattatccgcgacaatatctaaatttgtgtgccatccagctatccaacctttttcattactggatgtatcttcaacttcaatccatttacctactttaccaatctttttaaaatggtcacctttttcaactttatatatgactggatacgcagcgtttggacctgtacgtaattcagcattttcagttatcgtgatgttcccactatcttcactattgctattcagcaataaaaataaaaagatgataaataagacaaaggcaatcactactattagagtacgtttatttttaagaccctttttagataaccatgcctctatttttttcattgaattttgccgtcctgactttcataaataatagtgactggaccatcattatttatgctaacattcatgtgtgttccaaattcacctgttttcacagtaagaccatacgctcgtagcgcatcattaaaatactcataaatttttaccgcttgatcaggatttttagaatttgagaaacctggacggttacctttttttacatctgcatagagagtaaattgtgaaactgatagtatttcaccattcatttgttggatattaaagtttaatttattattgtcatcttcaaataatcttgcattagcaattttctttgcaattacatctgcatcttgctctgtagagttctgaccgataccgactaataaacaatatccttttttgatttgattatttaatgtatcattcgtcaccgatgcttctttaactctttgtacaactactttcatattttgcacctctagttccaaactcttgttactgtataaacatcaccaagttgtttgatcttttctaccacacgataaacatcattcacgtttttcaccatgacactaatatttattattgcatttttatcaatatctgaacgtcctgaaactttaattaaattgccggctgtcgagctaacagcttgtagtacttcattcaacaagccatttcggtcatacgcagttacctctaaatcaacctgatatttttgagttgcgtcttttgattttacccattcaacattaattagtcgttcagtttcgttcttaatatttgggcaatcagtgcgatgtactttaataccgtgacctttggtgatataacctacaatatcatcacctggtataggattacaacattttgacaacttgataagtacattttctaaaccttctacatagacaccactatcagtaatgatgttgtctttaataggcaatgatttcgtaacttcttgtgcttcatttaaagcacgttgtttatctaaaatacgttgtctttcagttaatttattaacaatctgtaaggatgtcacgccgccaaatcctacagctgcgaataaatcatcttcatttgcaaagttatatttttcattaacaacctgaatatttttctctgtcaaaatatcttcgactctaaatccttgctcttttatttcagcttcaaccatcattcggcctttttcaatattagatgaacgatcttgttttttgaagaaacttttaattttacctttggcactagacgatttaacaattttcaaccaatcacgacttggtccatatgaatgtttactagtacgtatttcaacaatatcgcctgtttgtaaaatatagtcaattggtacaattttgccattcaccttggcaccaatcatcttattacctacttcactgtgaatcgcataagcaaaatcaatcggcacagcaccatatggcaactcaataacatcactcgctggggtaaatgcgtatactttgtcactctgtaagtcatattttaaggtttccataaattcttgagcgtcagacgatgtatgatccgcttcagctaattcttttaaccaatttaacttattttgataagtttgatctttttcacttacttttttaccttctttgtaagcccagtgtgctgcaacaccatgctcagcaatttcgtgcatatcaaacgttcgtatttggatttcgagcgggtctccatttgggcctactactgtagtatgcaatgactgatacaaattttgtttaggcattgcaatataatctttaaaacgtcctggcatcggtttccataacgtatgcaccaacccaagtatcgcataacaatcattaatagaattgacaataacacgtatcgccaacaaatcaaaaatttgatcaaattgttttttctgcttcatcattttccgataaatactgtaaatatgtttaggtctaccatttatatcgccttcgatattcattcggtccatttcagtacgtattctatcaatagccgtttcgatatacgcttcacgttcactacgtttcttcttcattaaattgactattctaaaatattgcacattatcaatataacgaagagccgtatcttctagttcccatttgattgtattaataccaagacgatgtgctaatggtgcataaatttctaatgtttctcgagaaattctaatttgtttttcgcgcggcatggctttcaaggtacgcatattatgtaatctgtctgctaatttcaccaaaattacgcgtacatctttggcaatcgcaataaataacttgcgatgattttcagcttgttgttcttcttttgagcggtattttacttttttaagcttcgtcacaccatcaacaattcgagcaacttcttcattgaacatttcttttacatcttcaaatgtatacggtgtatcttcaattacatcatgcaaaaaacctgcgacaatcgtcggtccgtctaatcgcatttctgttaaaatacctgcaacttgtataggatgcataatgtatggtaatccgttttttcggaactgacctttatgtgcttcataagcaatatgatagctttttaaaacatactcatattcatctgctgacaaatatgattttgctttgtgaagaacttcgtctgcactatatggatattcgttgttcattatatgatacaccccattcatatttattacttcgccttaaacaatgatttaggtactcttgttgaatagtatttgtcccacaccaatcatacgtccgtcgacgataaatatttatcctgtcgtcattaatcgtaatattaattttacttgagcgagtttaatttgtatactattcctacttttaaaacttttacaaaaattcgacctaaatctactgtttcattttttaaatattagttctatgatactacaatttatgaaataaataaacgatgttattaaggtataatgctcaatcatctaacattttcagtaaataaaaaatcctaacatctcatgttaagaaaacttaaacaacttttttaattaagtcatgggttcttatacatttgatgaaggatttcatttgataaaattatattatttattattcgtcgtatgagattaaactcataacatcgtaatctttaattttttcaataccatttaaatatttcaattcaattataaatgcaatacctactacgataccgcctaatttttcaactaattttattgctgcttcaatcgtaccaccagtagctaataaatcatctgtaattaacacacgttgacctggtttaattgcatctttgtgcattgttaaaacatttgtaccatattctaggtcatactcataacgaatgacttcacgaggtaatttcccttcttttctaacaggtgcaaagccaatccccattgaataagctacaggacagccaatgataaagccacgcgcttcaggtcctacaacgatatcaacatctctgtcttttgcgtattctacaattttatctgttgcatagccatatgcttcaccattatccataattgtagtaatatccttgaaactaacacctggtttcggccaatcttgaacttctgatacgtattgctttaaatccattaatatttcctcctaaattgctcacgacaattgtgactttatccaattttttatttctgaaaaatcttgatataataattgcttttcaacatccatacgttgttgtcttaattgatatactttgctggaatcaatcgatcttttatcaggttgttgattgattcgaattaaaccatcttcttgtgttacaaattttaagtctaagaaaactttcaacatgaatttaagtgtatctggtttcacacttaaatgttgacacaataacataccctctttctggatatttgtttcttgtttagttattaatgctttataacactttttaaaaatatccatattaggtataccatcgaagtaaatcgaatgattatgttgcaaaactatataaagttgagaaaattgcagttgttgcaaggaattagacaagtcttccattgacgttggtaaatctcttaatactactttatcagtttgttgtttaatttcttcaccataataatattcattcgcatttactttatcacttttaggatgaataagcacgacaatattttcatcattttctgtaaaaggtaaactttttcgcttacttctataatctaatatttgctgttcattcatcgcaatatcttgaataattaattgcggtgattgattaccattccattcgttgatttgaacagatcctaatatattaattggctgttcatcttgtaactcaggttctaagtgaccattttgccaaaatagcgcggcgatattactttcaccaagtgtcaattttagatgatttttttgttgacctatcgccttaactgaagaaactgataaatcatccatttcaaaaataggtctagaaaaatctgttccgaagggtcttaaacgattcatatcacgaatatttttaatcgttatatcattttctgttaataatacatctacttgctttacgggatctaacgaagttgttttagataattctttcatccatttatttaaaccttcagctaacgattctatattttcaatatccatcgtcatacctgcagccatatgatggccgccaaatttagcgattaactcttgatgtgctgatagtatttcaaacatcgacacttgatcaattgatctggcggaaccttttgcatgattttgctccctatcaatatttaaaattaatgttggcaaagcaaatgtttcgacaattttcgaagcaacaatacctaagacaccttcatgccaattttcttttgctaaaagtaaaaataaatctccctttttaactttcgtttctgccatagccattgcttcttctgtgatagttgctacaatatcttttctttcacggttaaaatgttcaacttgttctgctaaaaatgcagcttcttcttcgtcgtcagtcatcaacaattcgcaagctaatgatgcgtcatctaaacgacctacagcattaagtctaggtccaataataaaaccaattgtttcttcatcaatattgtcattgtatcccgcttcttttagcaatgctttaacagaggtcggacattgatcattcaagacttttaatccttgtttcactaatgatcgattttcatcagttaaggatactaaatccgcaatggtacctatcgcaactaatgctttaaaataatcaggtacattttcaatcaatgcttgtgctaatttatacgcaacacctgcaccacacaattgttggaacggataattaaacgatggatgcattggatgtacgattgcatatgcttctggtaatgtactaccaatttcatgatgatcagttacaatgacatcaactcctaaatcttgaaccattttaatttcattatgaccttgtatgccattatcaacagttatgattaatgttatgccttcatcatgagcatttctaaatgctagttcgtttggtccatatccttcggtaaagcggttaggaatatgccatcctacttgtgcacctaaaagttgtaatgttgtcactaaaattgtagttgaggtaacaccgtcggcatcgtaatcaccataaactaggattttctcatcattcgctatcgctcttttaattctttcaatagtcttagtcatatcgctcaattgcagtgcatcatgattgatatctgtatctgaaatgatggattctattgcttgttcatcaataatcgatttactttctaatattttttttacgattggcgttaactttaattttgatgttaattcatcacttatgtattcagctggtttagttaatttccacttatacttcggtttaatcatatatatttacgcctcatttccaaaagacattatatctaaaattactttaaataaaaagcacttatctaaataatcaagactttaattataccattttttaaaaatgaatgcgggaacttatttatatatattttgttaaatttaaataaagtaaaaagcggtatgtgaactctttattgtttcacataccgcttaattcattttaaactaaaatcttttcatcgttcgatttcttttctttatatacaactaatttgtgtttcggcgattttttcaactgacgttttttcattattccccatagcggaacggcaatgaagattgaagagaatacaccagaaatcaatccgataaataatgctaaagtaaagttgaatatcgtaggagcaccgaagaatagtatagcaactactactacaataactgttaatactgtattaattgaacgcgtcattgtctgtctaattgatctattaacgatatcatcaatttgttctgttgtcgtaatcactttaaccttttgtaagttttcacgtacacggtcaaacgttacgattgtatcattaattgaataaccgacaattgttaatacagcggcgataaatgttaaatctacttcaattctaaataaactgaaaatcgctactataatgaatacatcatgtaataatgccaatacagatgaaagacccatgcgccattcaaatcgtaatgatacatagatgatgatacctatcgatgcatagattaatgcaagcattgcattttttgctaattcctgtccaataattggtgatacagtattaatttgaggtgtgtcaccgaatttcgatttaatattatcactcaatttattatcttgagcacgcgttaaatcgtctttaaattgaacagttgctactttattatctttaccattgatttgaatttgatccgctttaagtccactatcttttacaacttgctcaaccttttgttgagtaattgcttgtttagattggaaatctacacgtgtaccacttgagaaatcaattcctaagtttaacttgaagatataaagaataactaaaccgacaactacaattaaaatacttactccaattaatggcttagctaatttaacaaaattccatttctcgaatgaagttttaaggtcatgaacatctacaccttcattaatatcatgtcgtttattctttttaacaccaaataaccaaaattgatttttgaatatatttgatgaaacaagtaatgataataagaatcttgataagaacacggctgtaacaaagatcattagaatacctaataataacattgtcgcgaaacctttaactgaactttcaccgaagaagaataatactgctgcggcgataactgttgttaagttagaatcaaaaattgttaggaatgaacttttgtttgctttagaaaaggcttgctttatcgttctacctattcgaagttcatccttaatacgctcatacatgataatattggcatctacagccatacctacacctaataccaacgccgctaatcctggtaaagttagaaccccggaaatgaaattaaatgctactaacgttagatagatataagttgtcaatgcaataatcgctactaaaccaggtaatcggtagaatccaagcatgaataaataaattaatgctacaccaataaacgatgcaaacacagttttatctaatgcatcttgaccaaattgggcacctactgagtttgaataaatttctttcaagtcaactggtaaagaacctgcatttaacaattcggcgatttgttttgcttttttaacgccttcttgtcctttaaatccacccgagatttctacgctatcagaattgattggttgatcaacacttgctgcagaaataaatttagggtttttcttttgtgcttcttttttatagctgtcaccttttttgaaatctaaccaaacaaccatgacattatcacgtttcttagagatttcttccgttacttttttaaatttgtttttgtcttttactttaaaagtaactgtaggctggtttgtttcctgtttaaattcttgtttggcagatccctgtttaatatcagaaccgcttaattttactttatcttctgcatcgcgaattgttaaattagcttgagaagataaaattttacgtgcttcattctggtctgttacaccagcaagttgaactctaattctattaggttcttcaacttgaattttaggttccgaaacacctaaaacgttaacacgattttctaatgtttgcgctgttgattgtaaggcttttttatctattttgtcgcctttatttaaaggatcgacttgataaagcacctcaaatccaccttgcaaatcaagtcctaaattgacattctttataacacttttataagttgcagccattccggcaaacaacaatacgactaaaagcaagaacgcaattattctactacttttcttcacatgaacacctcattatttacgtatgtatttagaatacttgaatactattttataacgcaagttaaatctttcttacaaaatttattagccttatacatattaacatactagagcagggagtaaaaataatcatagatatatttaatttaaatttaacaattattatgtatcacaatttctttttttggaataaaaataagctattctacatactacttataacttaaaaaggatgaaacgctattcgtttcatcctttttaataccacttctcattatgaagggtcaacttgtttaatagcaggtttttcgaaagttaattcagtaccatgaccattaactgtaataacaacagttgtttcatctactgctttaacagtacctttaataccaccaatagttgtaattctttgaccagattgaatgttattaatcaactcacgatgctgtttcgcacgtttttgttgtggtctgatcatcaagaaatacataaccgcaaaaattacgactatatatattagtaatgaaaattgcattttatacgctcctcttgcttaaaagttttttgggttctcaacatttaatccatattgctcgaagaattcttctttgaaatctaaaagacgatcttctcgaatggcttgtcttatatcttccattaattttagcagaaaatgtaaattatgaatagtagtaagacgaataccaaaagtttcctctgccttgattaaatgacgtatatacgctcttgaatagttttgacatgtataacagtcacaattctcatctaacggtcttaaatcatctgcaaattttgcatttttaataactaaacgaccttgcgatgtcatacaagtaccatttctggcaatacgtgtcggtaagacacaatcaaacatatccatgccgcgaatactacattcgattaacgcatctggagatcctacacccattaaatatcttggtttatctttaggcataaactgctctgtatgttcaaccattttatacataaccggtttaggttcaccaactgacaaaccgccgattgcataaccaggaaaatctaattctactaaatcctttgcactttgttctcttaaatcttcatattcgccaccttgtataatgccgaacaatgcttgatcttcaggtctttggtgtgcatctagacatcgtttcgcccaacgtgttgtacgttcaatagatttttttacataatcatattcagccggcatcggtggacattcatcaaatgccatcataatatcagaacctaaatcattttgaatttgcattgatttctcaggactcaaaaataatttagacccattagtatgatgtctaaattccacgccttcttctgtaattttacgtaaattacttaaactaaacacttggaaaccgcctgaatctgtaagaatcggaccatcccaattcatgaatttatgtaatcccccagcgtgtttgataatatcatttccgggttgtaaccacaaatgatatgtgttgcccaaaatgatttttgcttcaatttgtcttaactcttctggactcattgttttaacggttgctttagtaccaactggcataaacataggtgtttcaaatgaaccgtgtggtgtgtgcacgatacctaaacgcgcacctgattgtttacaagttttaatgtgttcgtatgttactgcaggcatattcaaaatcctcacattctttttatataattaacattgcatcgccaaaactaaagaatctatattctaaatttactgccgttttataagcattcagaacattttcacgagtactaaacgctgatactagcataactaatgttgattttggtaaatgaaaattagtaatctggccatcaattgctttaaaatcaaatcctggataaataaatatattagtccagccactcgtttcaacaaatttatcatgatcgcgtcgaattgtttcaagtgtacgtgttgaagttgtaccaactgatataatgcgatgtcctttggacttagtatcatttaataaatcagctgtttcttgtgtcatttgataatattcactatgcatttcgtggtcattcacatcatcgacgctcaccggtctaaacgtacctaacccaacatgtaatgtaacaaatgcgatattaacacctttatttttaatttcagttaataactcatcagtaaaatgtaatcctgctgttggtgctgccgctgaaccactttctttagcgtaaactgtttgataacgatctggatcatctaaacgttctttgatgtatggtggcagtggcatttcccctaattcatctaatctttcttgtaaaataccttcataatgtaaacgcatgatgcgtccaccttgatccatttcttttatgcattcagctataattttgccattaccaaaattcaatttattaccaactttaatacgcttagctggtttcagtaagacttcccaatcattaccttcaatttgagttaacattaacatttcaacttttgcaccagtttcttcttttaaaccaaaaagtctagctggcattactcgcgtatcgttaagcactaatgtatcaccaggtctaaaatactcaatgatatctttgaaatgtaaatgtttcatttcaccagtttctctatccatgactaataaacgactatgatcacgatcttttaaaggcgtttgagcaattaatgattctggtaagtcatagtcaaattcttcaatattcacgttattctctctcctcattcgactttgcaaaatgttcataagctaatggtgttgcttttctgccacgtggcgtacgttctaaaaagcctttctgaataagaaatggctcataaacgtcctcaattgtaatacgttcttcaccaattgttacggcaatcgtatctaaaccaacaggtccaccattatactgcttaataatacagttcatcattttatgatcaatgtaatctagtccgtgttgatcaacttgaagtaaacctaatgcgtgcttcgttgtttcaatgtatatttgttcatcttcattcacttgctggaagtctcttacccgcttcaatagtcgatttgctactcttggagtccctctagaacgtttagcaagttcaatggcactttcttcatcaatacctgtgcctaaaacctcagctgttctaataatgatttcttttaaatctgattcattataatattctaatcttaagtgcacaccaaatcgatcccttagtggacctgttaagctgccagctcgcgttgttgcacctaccaaagtgaatggaggtaagtcgatacggatacttctagcctcatcgcctttaccaatgataatatctaaaaagaaatcttccattgcagggtataacacttcttcaacaacactactcagtctgtgtatttcatcaataaacaaaacatctccaggttgaagtcctgataaaattgcagccaaatcaccaggtctttctaatgaaggccctgatactgtacgtatattaacttccatttcattggcaatgatattagataatgttgtcttacctaatccaggggggccaaaaagcaatacatgatctaatggttcatgacgaagtttagccgctttaataaatacttctaaattactttttattgaattttgaccaatatattgtcgtaatctcgtaggtctaagcgacaattcgaaatcagtttcttcactatgcattgattgatcaaccatacgctcattcatgacaacacttcccctattaatctatttaaaattaagatacaactaattgaagacctgccttaacagcttcatcaactgagtcatatttatttttatttaacgttttctcaacttttgcaagctctcgtttagaataacctaatgcttctaacgctaacattgcttcttgcacgaattgatcttgcaccgtcgaagtagcgtctacttgtaataatgaatcgctatcttcttcagtaattttcactttaccttttaaatctaagacaatctgtcttgccgttttcttaccaattcctgggaatttagttaaatacgtatcattttcattttcaatggcacgttttacttcattaggcgtacttgtcgctaaaatagctaaagctgatttcggaccaataccagtaactttaattaaactcaagaacatatctttctcttcttcactactaaatccatacaataattgtgcatcttcacgaacaattaaagatgtatgaattaaaacttcatgatctaaatgcttttgaaaacgataagaatttggtgtttgaatttcataaccaacaccagcagtttcaacaactacgtgtgtaggatataaatgtgttaacttacctttgacatacgcgtacattataggcacatccttacatactcatactaattaattctacttttgatacataatctaaatttctcaaagcgccaataacatcttctactgaagtttctttagatttagcattcagtgataatgttattgttgctttttcttccattggaatactttgatgaatcgttaatacagatagttctaactttgatataacatctagtacacgtgccaacatacccacaatatcagttacatataaaattaatgtaaattctcgatggtcaagcattttatcgtctactggaaatatcgtttctctatatttataaaaagcacttctagatagatcaaactgtttaacggcatcataaatggacaatgtcggatcactttttaaggcatctttaatcttcaatgttttaaccacggattcaggcaagacatcttctctaattaaataaaactttttataatctttattgtccatcatgttacgctcctattcaacgaattcaaattctccgccaagaattctaacgatatcaccatttttacaaccacgttctctaagcgcatcatcaatacccatcgaacgcatttgacgagcaaatcgacgtactgctggatcactgttaaagtcagtcattttaaacattctttcaatagcattaccacttaccacataagcaccatcatcatctcttgaaattgtaaatttatcttgtgacggtgtatgtttatataatactcggttaatgccaactgactcctcttcttcaactgtgaagtcaacatctttatattcttctaatttatctgctattgcatataataattgatcaatattatcacgcgttattgttgaaactggaataactggcacatcttcgccaatttcttctttaaacaagtttaaattatcttgtgattcaggtaaatccatcttgttagctactacgatttgaggtctatcttctaaacgttgctcgtacgcggctaattcttgattaataactttataatcttcaataggttctctaccttcagaaccactcatatcaatcatgtgaacaataacttttgttctctctacatgtcttaaaaattgatgtcctaatccaacgccatcagatgcaccttcaattaaacctggtaaatctgccataacaaaactacgttgatcaggtgttgaaacaacacctagatttggtttaatcgttgtaaaatgatatgccccaattttaggcttagcttttgaaacgatagataataaagtcgatttacccacactagggaaacctactaatcctacatcagctaataatttcaattctaaagatacatctaattcctcacctggttcacctttttcactgaagtcaggtgcagggtttctaggtgttgcaaaacgtgaattacctcggccacctcgaccgcccttcgctactacagctctttgaccatcttcaacaagatctgctaacacttcgtctgtttcaacatttttaataattgtaccaggtggaacttttaatactaaatcttccgcatttttaccatgcatattactactttggccattttcacctttgcttgctttaaaatgacgttgatatctaaaatctaataacgttcttaaaccttcatccacttcaaatacgactgaagcacctttaccaccgtcaccgccagctggtccaccaaatggtacatatttttctcttctgtatgcggtaataccattaccaccatcaccggctttaagagatattttgacttgatcgacaaacatatatctcacctcttttacatataattttcattttcccaataattatagcatattagagccccttatatattgtaaataattaggggctcttatgcagttgcttttaaatttactttactcaaattgctgatatttccgaataccaaatatgatactttttttgctttttatactgcaactgtattcttttgtccccttatagtttagcgattaggggctcttatgcagttgcttttaagtttactttactcaaattgctgatatttccaagtaccaaacatgatacttttttgctttttatactgcaactgtaatccttttagccccttatatattgtaaataattaggggctcttatgcagttgcttttaaatttactttactcaaattgctgatatttccgagtaccaaatatgatactttttttgctttttatactgcaactgtaatccttttagccccttatatattgtaaataattaggggctcttatgcagttgcttttaaatttactttactcaaattgctgatatttccgaataccaaatatgatactttttttgctttttatactgcaactgtattcttttgtccccttatagtttagcgattaggggctcttatgcagttgcttttataaatctttgctttaaaatacttatatttctcagcaccaattatggtacagtttattctttaaacgctgcaactgtattccttagcccccttatatattgtaaataattaggggctcttatgcagttgcacatttagtataacgtctaaaattcccattttttaataacataatgaaaataataatgaaaaacgttttataaaaagtaaaaaacaccagaagattcacttctggtgttaactagacaaaattattcagctactgcatatacagaaacttgttttttgtcgcgacctttacgttcgaatttaacaacgccgtcgattttagcgaataatgtatcatcgccaccacgacctacattttcaccagggtaaattttagtaccacgttggcgatataaaattgaaccacctgttacgaattgaccgtcagcacgtttagcacctaagcgttttgattcagagtcacgtccgttttttgtagaacttaccccttttttagatgcgaagaattgtaagtttaattttaacatcggaatgcacctcacttataatttaatctaatattctcattatattcttcttcaatagtttgtaaagacacaagcattgtttgaagaattagttgcgcttcatcgttatttgtatcaacgcttcttatatgaaaatgaccaccattgtcgtcataattgatatctggtctctcagatgtcaatcctataatcgcattaacactaccaaacaatacagctgaagctccagcacaaacgatatcatgaccatattcaccatggtcagcatggccatccataataacgtctgttactttgccttcatcattaactgtaatatcaacagtaatcataataattacgcgttgattttatcgattgttaatttagtgtatggttgacgatggccttttttacgttttgaatttttacgacgtttgtatgtgaatacagtaatttttttaccgcgaccttgtttattaacagtagcagtaactgttgcaccttcaactgttggcgctccaactttaactgaatctccacctacaaataatactttatcaaatgtaaaagtatctccttcgtttacgtctaatttttcaacgaaaatttcttgaccttcttctactttgatttgttttccacctgtttcaataatagcaaacatactttgcacctcctgtataataagtcacgccatacataggtgacatttcgttattgagtcaagcgtttgcactctatgttgtttcggtcgcaactcgagtcatttataaacataaactcttctcgtttcttccttcaacgccttgattgacaatcgctttcttcattaaaaatgttcttgaacctatatttgagcggttgtatgtagctacttataactactcaactattgcatcttaccattgacgacgtttcatgtcaatgtcattgtttgtttttttaaggaactttataatcaacggataaagcataatcaacagtacaaaattcataattaatgttggcaataatctaaagactacaaaatgaataatatcaaattgaatgaatcctaacataccgtatattaatgccacatagacttctaataataaggtgctggctaatataataatgaataacatcgaatgatctttgtaaaaaattttaaagaatcgatctataagtgctaaaaacaatatatagccaaataagtacactccataaatactaccaaagtatacatcagtcattacgcctaaaaatatgctgagcaataatgatacgccaaagccacgatacactaccatcattaaaatatacataaatgtaaggtgtggtacaaatacaagttcaaacttacctatgtgcattggaataagaagcccaattgcagtatctatataaaatagtaaaatacctatcaaaaaataatacagtgtacgcattatttatccctgctttcatcatcaggaattgttttaggatctctttttgcaacataaacatgactcaaatctgttaagtctgcaccagtcttaaccctaacttctttagctaagccgtattgatcattttgaaccttagtcacttctcctatatataaattacttggtagttgatcagctaatccacttgtaacgactttatcaccttttgagatattatctctattattaatgtcactaattacaagttctgagttcttttcatcataacgatcaattaaaccaaatatatttttagaaccgtgttgtatatttacagataatttacccgcacgtgtattagttgagattaaatcaacttgtgaagaaaatttattaactttagtaactcttccaacaaaaccttgtgatgtcatcacagccatatttgaagttatacctgatttagatcccttatcaattacaattgtattcatccactgatccggatttcttgctaaaactgtagtagaaataggatcaaattttgaaatatcttttaaatcaagctctttttttaatttttcattttccgcttctaattgttggttcttagattctaactggctaatcttatttttagattctttagaatctccttttttaaaaaagtccccaatcgtaccagcaacaaaattaactggataactcacaactcgttgtccaaaagacacagaatcacctatatattgttcaggaggtgattgagattgtgaacgtatggacagcccaattaatgcaataaaaacgataattgcacataaaacaacaattaatttgttatttttaaaaaacttaagcacccagaacacctctattatgtcaaaatattgtatatccttttctattttatattactcccattatgaaataaagcactaactacgaattactttgaaaatgaacaactccgtaaaaaatttgtggcattttaaaaacaaaaaaactactagcaaacattccagtcactagtagtttaaataatcgatttaaattttaaaattatttgtttgtatcgttcgaggattcactgttcgaattctgaagttgtctccaacgtgcgaataagttctgggccttttgttgttcattagcttgtttctgttttgattgttctgccatttgaactacaccaaccttttaaatttattctagtgacaggataactaaaatatatttcttatgcaataatttcctattgataagcattttcaggttttagttgtaaattttgccctaattcatttaagtcttgttgcatttcaaattcagtattgtaaacacgcattgactcatctccaaatttataaagaataaattcgtctcctctttgacctataatatattgatcattataagccatgcgattcattccagacacagccataaactcttgtttatctatcattttaaatacatttttaatttggcttaatggtacattctttattaaatcattttcttttaatgaatatttctcaccacttacataaacatgttgggcatcattagtgggttgcgtaacttgattcatttgatcattatcgtgatttacaggattccaatcttgttcttttaaaaaaggtgcgtatttcaaggcgatataaacaattatcacaattgctattactgctataatgtttttaatcatactaaatatcaatctcatagttcgcctccaatgtcttcatctaattatatattttattatgtatattttcctcagtcttcagccttaatcatgatatatcttaggactgatgcacgttcatttaaaatagcttataattttgttatgatttaaaagcgtattaggaggtttgtagcattgagtatactaacaattattttaatagcactattagtcatcctcctttttagagttggactttctattttgcgatttttaatttatgtcggacttgttttattatgtatttacttaggatatcaaggtttaatttggttgctcgatttttttcaaataaatagtggatttttaccgcactttcaatttaacaattaaatttattctgcataacaaaactcctaatgtactagtttagaattttttaactagttccacattaggagttttaatttgttttcaagcacggatactacttgatgaacagattactattacttacgcccaaatgcgttagataaaaatcgtatcagcgcgtagctaccacttagtaaaaggccccaaacgattccagtaaaaattgagccaattgctacacttaataaaggaaaagcttgtttcgtaacgattacacctgctaacgcggttactaaaatacctaacgtagataaagctaatgttattaaaagattgcgctttgttacaggttcatttttaatatttaactgcatggtataaaccattggcacgagaaccccgataataataaatagagtcactatttttcctccaatgaaagtacttcgtaggtattatacacaagatacgtcattaattctatcaacttcaatcattttcatcaaagtaacccgcttctacaagactggtaaatctattatcaccgattataatatgatccaataaatctatccctaaaatcaaaccacactccttcaacctcattgttgttatgatatcttcttgtgagggcgttacatcaccggatggatgattatgaactgcgatgattgcattggcattttctctcaccgcaatactaaaaatttcacgtggatgtacaatcgaactatttaatgtacctttaaaaacacaggtttctttaatcactacattttttgaatttaacaataaaatgacaaaatgttcttgtgttaaatctttcattgttggaatcatataatcagcaacatcacttggttgcgttatttttatacgattattttcagctcttctccccatcctttcccctaactcaaatgctgcttttaaagtaattgctttttgtaatccaatccctttaacttttatcaaatcgttaattgaagattttttcaattcattcagattcgaagcagatttaagcagttcattactaatgtctatgctcgagaatccttttcttccggtgttaattaatatagctaataattctgtattcgaaagactttttgcaccatggcttaacaaacgttctcttggcatttctgaagttaccatttctttaattttcaaaaatatacgcctcctaaaaattgatggatatcattataaaaaagtgaattgataaaaaaggaaataaatataaatggaacaaggggtaatagtttaatcggcttaaatatcatggtaattaaagcaactaaactagcaatgacaaatgtaaataaaatgacataaatagtgaattggagagggaaaaacaaagaaagtgcagatattagtaaaacgtcaccataaccaatatatgcccgaaataaaaagtagaatatatgcgtggtcatactaataatgataaaagctactggataaatcatacttaacgagagagaaacgatacaataaattataattaagcgacaatctaacattaaagaagtgatatcggtcatagtaaaaataagcagaaaaacatatgtagttataaatagcgtagcatttacgtatgtgaaatcatacttaataaagacgataggtattaaagcaaaggtttcccctaagaaatgtgttagggaaatacgctttcgacagtttcgacatcgcccttttaataataaaaaactaataatcggcattaattcataccatttgagtgatgaattacaataatcacatttcgatcttctatgtaaataatcaaatgacgtttcttctatagatataaattgatatagaaaactaaagatacaactgcaactataagataacaatactaccaaatgacaacctccttacgtaaagtatagttacttattaccgaaatgtaaatatacactatttttcaagaattgaacctctttttcatttaaatttttcaatattgctaagcataattgatggatactttaatagcccattactgcacggcaaaattaataatggcaagaaattgaaccttataaacacatacgatttagagcataaaaaataaccatgaagctctacctattgattaaatagattcttcatggctattttagttttagttttataatgcttcaaagtctaattttgatttaacttcacttatgaaatacagactaccggtaattactaatgtatcaccttgataattttttataaattcaacgtagtcatctactaattgtatttcatcattttcaatactacctacaatttcttctttgcgtaacgctttcggaaaatcaaattcagttgcataaaacgtatgcgcaattaaacttaaatgtttgaccatctcgttaatcggttttccgtttattgctgagaacaaaatatctactttttctttatcatggtactgtttaattgtatcaattagagcatctatactctctgaattatgtgcgccatccaaaatgattaaaggtttgtcatgcacctgctcaatacgtccagtccaacgaactgattcaataccgtctatcatcttattgaaatctaattcaattaatccttgttcatttaattcaataagagctgttatggctaatgcagcattttgtttctgatgttcacctaacatgcttaaaatgattgtttctaattcataatctttataacggtaagtaaattcatcattttgcgatacaacaacaatttctctatctaattcaattggctttgcatgttgttcaattgcgcgttcacgaacatattttaatgcatcttcatttttaacagcatatatcactggaacgttaggctttataatcgcgcctttatccctagcaatatctagataagtaccacctaaaatatctgtatggtctagaccgatactagttaagattgataaaaccggtgtaaagacatttgtcgaatcgttctttatacccaatccagcctcaacaatgacaaaatcaacaggatgtatttcaccaaaatataaaaacatcatcgctgtgattatttcgaattcagttgcaacacctaaatctgtttcacgttccatcatttcacttactggtttaatacgtgatactaattctacaatagcgtcatttgatattggcacaccatttagactaattcgttcattaaatgtttcaataaacggcgacgtaaatgtacctacttcataaccattttcaactaaagctgttctaaggtaagcaactgtagagcctttaccatttgtgccacctacatgaatacccttaatgttattttgaggattattaaattgtgctagcatccattccatacgtttaacacctggtttgatgccaaatttagttctttcgtgtatccaatacaagctctctaggtaattcattgttactaactcctatgcttttaattgttcaattcttgccttcacaccatcatatttttcttgataatcttgttttttacgtttttcttcatttataaccttttcaggtgctttacttacaaagttttcattagagagctttttatctactctatctaattcgctttgaagtttagctaattctttttccaaacggctgatttccttatccatatcaattagcccttctaatggtaataccactttacctgcaattacaactgatgtcattgctttctcaggaatttccacgtcagtgctaatatttaaggtactaggattacagaatttgattaaataatctttgttttgtgataaagttgtttcaatttctttatctttagcttgaattaaaataggtatttctttagacaatggcgtatttacttctacacgtgattgtcttacagatttaatgatttcaacaagttgttgcattgtttgtttactttcttcaaaaatcaatgattcacgcacttctggccatgaagctttaacaattgtgtcaccttcatgtggtaaactttgccatattttctctgttacaaatggcatgaatggatgtagcattctcataatattgtctaaagtataactcaatactgaacgtgtaacttgtttttgttcttcatcattactattcattggaattttactcatttcaatgtaccaatcacagaaatcatcccaaatgaaattatataatgcacgtccaacttcgccgaattcatatttgtcacttaaatcagtaactgttgcaatcgtttcatttaaacgtgttagaatccatttatctgctaatgataagttaccacttaaatcgatatcttcaactttaaagtcttcaccgatattcattaaactgaaacgtgccccattccagattttattgataaagttccacactgactcaactttttcagttgagtatcttaaatcatgtcctggagatgaacctgttgctaagaagtaacgcaagctatcagcaccgtattcgtcaataacatccattggatccacaccattacctaatgatttactcatcttacgcccgtcttcagcacgaactaaaccgtgtaataatacatcattaaatggacgacgatctgtaaattctaagccttggaatatcatgcgtgctacccagaaaaagataatatcgtaacctgtaactaaggcatttgttgggtagtatcgtttaaagtcttcactttctaaatcaggccaacctaacgtagagaaaggccataaagcacttgagaaccacgtatctaatacatcttcatcttgttgccaattttcaatatcagttggcgcttcttctccaacatatatttcgcctgtttctttatgataccaagccggaatttgatgaccccaccataattgtcttgaaatcgtccaatctctaatattttccatccattggttaaatgtatgttcgaaacgttgcggataaaaatcaatacgatcatctgttttttggttatctaatgaacgtttcgctaagtcttccatgcgcacaaaccattgtgttgataaatatggttcaacaacagcgccagatcgttctgaatgacctacagaatgaacatgatcttcaatcttgataactaaatcttgttcttttaaatctttaactagctgtttacgacaatcaaaacggtccataccttcatatttacccgctttgtcgttcattttaccattttcatccataacgataatattttctaattgatgtctttgaccaatttcaaaatcattagggtcatgtgctggtgtcactttcatagcaccagaaccgaagtctatatcaacatactcatctgctaaaataggcagttcgcgtcctacgattggtaatataacagttttaccgattacatctttgtatcgttcgtcattagggttaacaacaatcgctgtatcacctaacatcgtttctggtcttgttgttgcaatttcaataaaaccttcaccatcagcgtaaggatatttaaaatgataaaacgcaccttgaacatcttcatgtattacttcaatatcagataaagctgtacgtgctttaggatcccaatttataatacgttcgccacgataaataattcctttattgtataaatcaacaaaaacttttttaactgctttacttaaaccttcatctaaagtaaaacgttctctactataatctaaacctagacctaatttagcccattgcgcacgaataaatgacgcatactcttctttccaatcccatgcctgttctaaaaacttttcacgaccaagatcatatctagttattccttgttcatttaatttagcttctacctttgcctgtgtcgcaataccagcatgatccatacctggtaagtataacgtatcgtatccttgcatacgtttcatacgtgtaatgatatcttgtaaagtcgtatcccatgcatgtcctaaatgtaatttaccagttacatttggtggcgggataacaattgtatatgtttcttttgatttatcttctgacggtttaaaataaccattctttacccattcttcataacgtcccgcttcaacttcacgaggatcatattttgatttcatttccatttgctatacctcctaaaaaaataaaaatatccatcctatatacaaataggacggatattccgtggtaccacctatattcaagaaggatgattaatatcaaattcactcttttaacataattggaataatcataccaatactatcatcgtgaaatttgaaatgcttcatctcttcaagcactctagattatgattaacgctcaaacacgtcttagcctactattaatcacgttcagctaagatactctgtgggctaccttcagtaaaaatcatttacatactcacaccaaatcatatgctctctttaaaataatttgaacttactcttcccaaatcctatattaaactcttaacttatagtataatgattgacaaaataagtcaatgtataggtgggaataaaatgaatgaatgcgcatttggtactaaagatccagtctacttagactatcatgatcatgtatggggacaaccgctctatgatagcaaggcattgtttaaacttttagcattagaatcacaacatgctgggctatcttggttaactattttaaaaaagaaagaagcctatgaagaagcattttatgatttcgaaccagaaaaggtagcacaaatgaccgctcaagatatcgaccgcttaatgacttttccaaatatcgttcatcatcgtaaaaaattagaagcaattgttaatcaagctcaagggtatttaaaaattgaacaagcatatggtagttttagtaaatttttatggtcatatgtaaatggtaagcctaaagatttgcagtatgaacatgcttctgatcgtatcacagttgatgatactgcaacacaactatctaaagatttaaaacaatacgggtttaaatttttaggtccagtaacagtattttcgtttttagaagcagccggtttatatgatgcacatttaaaagattgtccatcaaagcctaaacacaattaatttgctatagcatcataaagtaaacgagacatcatctatttttaactaatagactgtctcgttttttgatgtgaaaatttattcaaatcataagttaaagttccaagttaatgcactgctaatattagatatcttaatctaaaaatagatgtacaacctttgcttaaaccttaataatgaattctatcctaagcataaatcaacttaaatagatgatagtttctaatcttcacgcttattcgaacgatattttaaaaagtaattaattcctggtgcaataataaataggatgaaaaagattcggaaaatatgataactcgtaatcatagcaacatcggcaccagtagctaatgcaactaaaactatctgattaacccctcctggtgctgcaccaagaaacaattcattaataggattattatcaaagaaatgtatgacataaaccatgattagcgcaccaattatcaacataatattttgaattgtaattgcgattgctagtctaccttttaaatctgacaataaatgcgcaatttgaactccaattctaatcatatatattagttgtgccatgttcaacaaccaatgatctagtgtaaatgttaaacctgtagaaaaattccaaacaattaatacaatgagtggtgctaataattgaaatgttggaaactttattttagacataattagataaactataaagatagctatcgctaaaataactatttgccctatgtttaatacttgtgataaaggcaagacttttgttaactttccattcgcatgcatgttaccatcatgaaaaaaatatgaaatgaacggtactaaaacaacaacaaatataattcgtgatgtttgcgttaagctaacaactaacaaattagcacgtttgtcttgttcagccatgaccagcatttgtgttagtgctcctggtataacacttaaaatagctgtttctgtattaatacgtgcaatttttttaaaaataaatgccattactattgcaattaataatatcgaaatagatacaacaataatcgaaagccaattgtctttaatatccataacgacatttttcgtaaacgttgatccgatttgcacacctaatagtacaatacctaattcactaagtaagaatggccatttaatatcaagtttgaaaacttttacacaaatgattgatgcgataataggaccaaacataaatgggagtaatacgtgcgatgaatacagtagaatactaataaaaaatgataaaacgaacacaatgaaattatttctatatatcattgtcatgttttccacttctttcaataaaaaataaaatgactaaattgctgcttgagcttcacgtttgttaagataacaatatccgctagcagttttgactacaaagcatatatggactttcactatcaagtcgccgcccatgcctgatatacatttaaaaagagcctgaacaaagttcaggctctcaatttgtccgtatatttattttacaatacgacttaaagccgtatcaaatgcttgaatcgttttttcaatatcttctttcgtgtgtgccgtagataggaatgtaccttcaaattgagatggtggtaaaaacacaccttcttttgccatttctcgatacatttctgcaaataatttcaaatcacttttattcgcttgttcaaaattagttacaggtccttcatttaagaaataaccaatcattgaacctgctctatttacagttattggtacattgtgtttagcaaatacacgctttaaaccgtcttcaagtatatcgcctaacatattaaaatactcatatgtctctggcgttaattggcttaacgtttcataaccacttgtcattgcaagaggatttcctgataacgtacccgcttgataaatatttcctaatggtgctatatgatccatgatttcttttttaccaccaaaagcacctacaggtagtcctccaccgataacttttcctaagcaagttaaatctggtgtcacaccaaagtaaccttgtgcacaatgataaccgactctgaaaccagtcattacttcatcgaaaattagcaatgcgccgtattcagtcgtaatatttcttaatccctgtaaaaaaccttcaatcggcggtacgacacccatattaccagcaacaggttctacgattacaccagcaatatcgtctccaaatttttcgaaagcgattttaagtgcatctaaatcattgtatggaactgtaattgtatttttagcaataccttcaggcacaccaggagaatccggcaatcctaatgttgccaccccagaaccagctttgattaataacgaatcactatgaccatgatagcaaccttcaaatttcacaattttatttcttccagtataaccacgtgctaatcttaaagtatccaatgtagcttctgtaccagatgacaccatacgcactttttctattgaaggtactcggtcaataacgagctgcgccaatttattttcaagtaatgttgatgcaccaaaacttgtacctttatcaattgcttcatgtaaatgactaataacttgagggtctctatgtcctaaaataagtggcccccaacttagtacatagtcgatatactcgttaccatcgatatcataaatttttgaacctttaccgtgatccataaaaattgctggtgtatctactgatttaaatgcgcgtactggactatttacaccaccaggcattaaagtttcagcaaccttcattgcttcttctgatttcgtatatctcataaagtaaattcctcctatagtttatggaaaatcatacatataaaaccttatttatctaaatagcgacaaatgtcctttgcaaaatacgtaataatcatatcagcacctgcacgtttcattgaaaccatttgttccataacgacacgttcttcatctatccaaccattttgtgccgctgctttagtcatactatattctccactcacattatatgcaacaactggaacattcgtatgatttttaacatctcgaactatgtctaaataacttagagcaggtttaacaatcatcatgtcgcacccttctttaagatcactttctaattcacgaagtgcttccaaacggttagcagggtccatctgatacgtttttctatccccaaatgatggcgctgaatctgctgcatctctaaaaggtccaaagaaacttgatgcatacttgacaccataactcattataggaatattgtaatagccggcttcatctaatccacgacgaatttcagcaacaaaaccatccatcatattacttggcgcaataatatcagcaccagcttccacttgagaaattgctgttttaacaagcagtggcaatgatttatcattgtcaacgtcatgtgtatggtcatcaatcacgccacaatgaccatgatcagtatattcacataaacaagtgtctgcaacaattaataagtcatcatacatttttttagcaatacgtgttgcctgttgaataacaccatcgtgaatgtatgcaccagtacctatatcatcttttgagtttggaacaccgaaaaacataatggcacgtatgcctaagtcataagcttcttttaattcactttcaagtaaattcaaactgatttggtatacacctggcaatgacttaatttcttttttcacatcgtctttttcaactacaaaaattggatatattaaatcttcttttcttacatgattctctctaaccatatctctcattgtcgctgatgatctcaatcttctatgtctatcaaatttcatttttagcccctactttctaaaatcttttcaattagtgattcgagtgtttgaatttctgcaattgttactggttgttgatatgatttaatggtccgtgctgtttgttctccaatagcaaaatacgacttgaattttggtacaaatccttcattaaaataataacgtactgccgacgaacttgaaaatgttaatgcatcgatttgttgatgttctatcatttctttaacatcttgtatattttgtttgttaggcactgaagtatataaatctattttaacaacttcattatctttagataacgctgctaataacaatggtctcgccaattcactcgaaggcaaaagtattttttggttagtttgattaaatgattttaaaaatccttcttgagaaaagtcgtttggcataaaatcaactcgaatgccaagtgattcacaatattgcgctgtcttacttcctatcacagcaatgttatcaacattaattccttttagatatttataaaagaatttcacagcatttttagatgaaaaaataagccagtcatagtgttgatttaacaaatgaatatcaaaatttagtggctttatatcaataaagggtttgtgaataattgatactaaatcactttgcatgtcatttgtttgtgtcataactacaactggcttcatatttaaacgtcactccattatttaatgttgttcatttaagcgttttataatttcataagcaccttgctcttttaatttgttactcactgttttgcctaactcaaccggatctgttccgttcattgtatattcaaatcgctctttaccatctggggtcataattaaacctgtaaattcgatttcgttttgatctgagattgtagcatatcctgcaattggcacctgacaactaccatccatttctgctaaaaacgttcgttcagcagtcacacattttgcaacctcatcattatgtactttgcttaataatgttaatagttcttcatcgtcactacgacattctatccctaaagcaccttgtccgattgcaggtaacaatgtatctctatcaagataagatgttacaatatcatctgaccagcccattcttcttaaaccagctgcagctaaaataatcgcatcataatcttcagtttgtaacttttctaatcgtgtatctatattacctctaatccatttaatctctaaattaggatacttagataatatttgtgcaccacgacgtaatgaactagtaccaataatactgccttctggcaattgggatagtggtgtatgtgttttagaaatatacgcatcaaaaggtaattctctatcagggatacaacctaatgttaaaccttccggaattacacttggtacgtctttaagcgagtgtattgccatatcgatatttttttcaaaaagttcatgttgtatttctttaacaaataagcctttgcctccgactttagacaattgtttatctactatacgatcgcctttcgtgacaatttctttaatttcaatttctagatttggctcgacagcttttaatttatcaataaattgctggctttgtgttaaagctaatttacttcttctggagccaacgactaatttacgcatgttcaattcctcctaggaacggattgctctagattattttctcaattcacaaaatgtgttgcaaaaaataaattaatcatatttaagcaaaataaaataatgttatagtatattaaatatcttgaattcaaccatttgttgattctaagtaaaatataacttccatataatactgtaataattgaagagagtattaccttcgggtcaatgaatatacgttcaccaactgaaattacaccccactgtgtacctaaaataatactaaatatgagaattatccacccacttaacgttgagtaaaacacaattgattcaagtgtagcaacgctaccaattctaaagtatttttgatcaaaacgtttttccttcaaattacggtattgcatgatatacagtaatgcattgacaaaagctaaggcaaagaagacataacttaacacagctagaccgatatggactaacagtaactcgtctacaacagcaattttctgaaccttattagtataatgtgtcggttgaaatgtattcatccctaaaagtgttaaccctattaaattcaagaaaaacacagagaaattcaaaactttgataaggttaagaattaaagagattgaaataatcagccaacttaaagtatagaatacatctgaaatagaccctaatggaatatgtctagtttgtataataaaaatagataaagagattgtttgtaaaacccaaacaatccccaataaatatatgcctaaacttctaatcttatgacttttttgtacaaaatcataaaaatagcaaatgatactgattaagtatattaataatataatttcattgaatcgaataaacaggttttcttgcatattatcaccatattaatatgcttattcaaaactaaagatacgtcgcgctgaaatttccttgaccttgctttctttttgttgcttcgcttgctcatgaggacattcagcttcgatatcaaatatattttgaaatagctctaatttttcattacttttcttatcactacttaattctttggcctgtttaataggatctttcaacatttgattgatgatactttttgtatgtttagatataattttacgttctctttcgcttaaccctggcaatttacgatcaatactgtccatcgtttctgcttgaattgccatagctttttcacgtaaagctctaatcactggaacaacacccaacatactaatccactcattgtgtgcatgtatttctgcaggaatttgttccgaaattgttgcagccgctaattgtcgctcacgtaagtttgcatcaactaaaccttttaagtcatcaacatcataattaaagatgtttgtgatggcactaataccaggttcaatatctcgaggaactgcaatatcaatcaatactagtgaatcttgctttctattttctgcaattctttctatcatttcatttgtaatgatataagattgtgcactcgttgaactaatcacaatatctgcactttcaagtaaatttggtaatgatgatagttcatcatatttcacttgatgctttgctgctaatttcatagcattttcaattgttctatttactactgtaatatcagtaattccagaaccaagaagatttaatagtgataattcactcatttcccctgcaccaataatgatagcttgcttacttttcaatttgccaaatacttttttcgccaactcgaccgcagcataagacacacttacagcattatcagctatatctgtttcattatgtgctctttttgcaaaagtaattgcctgtttaaatagatgattaaaaattgttcctgtcgtacctgtgctttgcgctaagaaaaatgcatctcttatttgacctaaaatttgagtttctccaagtacgattgaatctaaaccagaagtgacacgcaataaatgttctactgcttcgtcccccacttttacttctgacattgctttaatatcagctacttcaaatccaaatgcacgagctagaaatcgttgaatatagtaacgacctgtgtgaatttgatcaacaacagcatatacttcagttcgattacatgttgataatatgacattttctaaaatagatttagtttcatataaatcttcatgggcaattcgtaaggcatcatctctaaaagcaacttgctctcttagtgcaacatcagctgtgcgatgatttatactaattgcaataaaatgcatttgaaacgcccccatatatactaacaatacaaatattataacataatttaaaatccaattaagtacgatgcttaaataaattataatctttctaatttacttttgagtttttgacaaaatgatgaacgttgaaaaatgttatcaattgtgtactaattaaaagtttcgtgcttacattatttttaaaatttttgtataagttttgtcgtacaaaaactatgaaatatacggttcaattaaattccatatttgttgttgtttattattttgaattgatgaataacttacaattgtatcgtctgggtccatatctaattgtgtcttaatatttttaatatgcttttgaactttaccttttggaattttgtcttctttagtgcatataactaaagtaggaatatcaaaatgtttcaaataattgtacattaagatatcatcttgtgttggatcatgtcttaaatcaactaattgaataactaattgcaaattctctctcttagttatatattcctcaatcattttcccaaatttttcacgttgtgttttacttactttagcatatccataccctggaacatccacaaaaataagttgttcatctatattataaaaatttaacgtttgcgttttgccgggttgctgtgatgtacgtgccatattttttctgccaatcatactattgataaatgtagacttacctacattagatcgaccgctcagtgcaacttcagacaattctgtttctggatattgttcttcttttactgcactaatgattaattctatattattaggattaactttcattttatatcctcacttttttatattctctttcaactctaccattatataatatttgaacctttcggtatacattataaaaaagctccgatcaaagttaaactatttgagcgtcaactttgattggagcttttcacttttataacacatcaatgattaagctgatgttttactattattaattaaattgccttctgcgtcgtatagttctggttcagtttcttcattaattgtttgtgctgtaataactaccttcgttacattttcgttagaaggcacatcaaacataatatcgattaacgattcttctatgattgaacgtaaaccacgcgcacctgtttttctttcaattgctttttcactaattgctgataaagcttcttcagtgaactctaaatccacatcatctaattccagcattttagtatattgtttcacaagtgcatttttaggttgcgttaagatgtttttcaacgcagttacatctaatgtttctaaattagctacaattggcacacgtccgataaattcaggaatcaaaccataggcttgcaaatcttctgggcgaatttgtgctaataatgcttgttcgtcatatttatcagcttcattgcttgagaaaccaataactttttcaccaagacggcgcttaatcacttcttcaataccatcaaaggcaccaccaagaataaataagatatttgttgtatcaatttgaatcatttcttggtttggatgtttgcgtccaccttgtggcggaacacttgcagtcgtaccttctaagattttaagcaatgcttgttgaacaccttcacctgaaacgtcacgtgttatagatgtgttttcagatttacgtgcaattttatcaatttcatctacataaataatacctttttcggctttatcaatgtcaaagtcagctgcttgaattaatctcaacaagatattttcaacatcatcgcctacataaccagcttcagttaaacttgtcgcatctgcaattgcaaatggtacattcaacgtcttggctaatgtttgagctaataatgttttaccactacctgttggcccaattaatgcaatgttacttttttgtaattcaacatcatcttcttttggtcctaattgttgaatacgcttatagtggttataaacagctacagctaaagattttttagctttttcttgaccaataacatattcgtttaaatgatccataatttctttaggagtaggtaattctgtcatcgcttcagaagtgttttgagctaattcttcttcgacgatttctgagcataattcaatacactcattacaaatatatacaccacttcctgctacaagtttttttacttgatcttggtcttttccgcagaaagagcatttcaaattttcttcatcttcattgaatttaaacattctttttacacccctattcgttaaagactatactagattggatattacaatgcaacatattaacatacaaactttttgcttaaagaatagtagcagatacataagctatgcatctgctactcatttttgtaatttaatatttaatgaagattaatcttctttagttccttcaacgaactttgcgttatctcttaataaatcgataactttttggatacgaacatcatttttaatgatatcagtattacctaaagtatttttgatatcttcaactgagatattaaattgtttactcattttttctaattctttatcgatatcttcatcagtagcttcgattttttcagcttcagcgatcgcagttaaagttaagttagttttaacacgttgttctgcatcgtctttcatttgctctcttaattgagtttcatcttgacctgagatttggaagtacgtttgtaaatctaaaccttgttgttgaattctttgtgcaaattcagacaccatacgatctaattcagtattaaccattgcttcaggaatatcgattgttgtattatcagtagcttttgtaatcgcttcttctttttcaacattttcagcatctgtagctttttgttcagctaaacgtttacgtaagttttctttgtactcgtctactgtatttgcttctgcatctaattcattagcaatttcatctgttaattctggaacttctttaaatttaatttcgttaacttttgttttgaaagttgcttctttaccagctaattcttcagcatggtattcttctgggaatgttacgacaacatctttttcttcgtcaactttcataccttctaattgctcttcgaaaccaggtatgaatgaacctgaaccgatttctaaatcgtaaccttcagcttgtccaccttcgaattcttctccgtcaactgaaccactaaagtcaatgttaactgtgtcgccattttcaacaacaccatcttctttaactaccatttcagctaaatgtcctaagctgtggtcaatcgcttcttgtaactcatcatcagataattcagtttcttgtttttcaatttcaagacctttatagtctcctaatttaacttctggctcaactgtaactgttgcttcaaaaatgaaatctttacctttttcaatttgagtaacacttacttctggttgtgcaactggtttaatatcagtttcgtcaattgcttcaccataagcatctggtaataaaatgtcgatagcatcttgatataatgcttctacaccaaagcgttgttcaaaaattggacgtggcactttacctttacggaatccaggtacgttaatttgtttaaccacttttttgaatgcttgatctaacgctttgtttactttttctgcaggaacagtaacagttaataaaccttcgttaccttcctttttttcccaagttgctgtcatgtatatatacctccatgattaactaatttattttttcaacttccctattatatcataggtctattccctatacaaacattgaaatcacaacgtttatatatttgtaaatcaacttttttcgtcaaaactatattaaaatgctgagtattattttgcaacaatttaactattattattcaaatctaattgctgaataaaattaaatgcatcgatactttgtaattcacatttaagtcctaacatatttttgaaataacattcgtatgcattaatccatttattcgtttcaaacaaagtttcaatatcaattggataaatcatgatagagtgattattcataatatggtgtgcttcttcagcgatatgtaatgcaccatcatttaatgtttccataacgttaggtataactttttctttcagtgttgtatgttctagcccatttaaattagctggtacaaaagttacatccataccatacttttcaattgtcagttcttgtgtacaatttgcaaaccttaaatactcaatcattaaactaatgaggttataactgtacgtattagattttaatatatataataccgtttcttgaaattgaaaatgaccattgtctattaacttcaaaatcaagtgcgtctgttccctcattgataacgtatcaaaatcagttaatgactgagtcaatcgtttttcatcttcaattaattttgacttagcaaattctttaagaggatgtaatgccattcttgttttgtgatctttgacttcatcaataatttgatgaattacttctaccgcttcaaaatattgtcccaaaccaatcaaacttttcacgtaataaatcatcaatgcatcatattgttgtatgccagttttcaataagacaattgtttcttctcttaattcaagaaatgaccccgtctcatataacatacggcatttcatcattgctatttcttcagtgagttcaaattgacgttcatattgcacaatatattcatacatcaggtcatagttttggtcttgttcagcacgttttatatctttatataactttttcgaagagttaggaaactgaataatatctgacatatatgtcacctcgtttgattataaatcttgaaggattaatgcgctccacgtttcgaaatcatcatatgactctatgttgcctttttcaacccattttattcgtaaagtatctgtttctttagcttctacatcattcgtacttacagtgattttaaatacaacaccaatatgtaccttgcccacttcattattatcgtcattaataaaaccgatatattccatattttgtgaatcttgctcacttaaacctacttcttcttctaattctctctgtgcattaactctcaatacttcgttaatagattctgctcctggaacatcattcatatgaccgcctacacctattgaagattgtccatgcaatcgagcttctccaccgccagataatcgttcatacactaatatctcgccatgctcattttcaagtaaacaataagaaatgagttgtttatatgatggatcctcttccatatcgccgcgtcgcttaacttcatattgacttagcgcatcaaaaatattttgaccttctggtttattattatttaaaaacccattgaaagtattcttttcattattaaaaataatttctctaggtactacaatgatttgttcatcaaatttagacatcgtataaaactcctcactttaatgtttgttctcttaaatgcattttagcaaatatgtcatattttagcgattaaatgtggcattttgctttttaaaaaataaaaaagagatgacaatgccatctcttttttataagtgttattattttaaagcatctttagctttagttactaattgagcaaatgctttttcgtcagaaattgcgatttctgataacattttacggttaatgtcgataccagcttttttcaaaccgttcattaaacgtgagtagctcatttcatgttgacgagctgctgcgttgatacgtgtaatccataatttacggaagtcacgtttacgttgacgacggtcacggaaagcatattgacctgatttcattacttgttgcttagctactttgtataatgtatgttttgaaccgaagtaacctttagctaatttaatcgtttttttacgacgcgctcttgttactgttccacctttaactcgtggcataaaaaattcctccttaggtaattcctaccgatttctgtatttgttcttattttttgtatgctaataattgttttacacgtttcatatcgctcttagacactaatctagctttacgtaattgacgtttttgtttagtgctcttgtttgcgaataagtgagatgtgaaagctcttgaacgttttaattgacctgaagcagttcttttaacacgtttagctgctccgcggtgagttttcatttttggcataatataagtcctcctgtaatagctttaattatttttcagctgttggcgctaacatgataaacatttgacgcccgtccattttaggtttttgttcaactgttgctatatctttgcattcatctgcatatttttctagcacacgttgaccaatttccttatgcgtaatggcacgccctctgaaacgaatagatactttacatttatcgcctttagttaagaatttacgtccgtttttcaacttagtttggaaatcatgttcctcaattgttggacttaaacgaatttctttaacattgataattttttgtttctttttcatttctttttcttttttctgttgttcgaatttgaatttaccgtaatccataattcttgcaactggtggtttcgcattcggtgcaacgaccactaagtctaaatctacacgttcagccatttctaaagcttcacgctttgatttaacaccaatttgttcaccatcttgaccgattaaacgtaattcttttgcacgaattttgtcattgatttgagtttgatcttttgctatggttgacacctccaaaatttttacgaaatttgcaccaagcaaaaaggaagagcaggtataaaatacccgctcttccttatacacagttatgtgtaatgtgattaacctgccaactgctttatgcgtcgctacaggtgagaagcgggtgcttctacttggttcgtttcgtattcaacgttgttaatcatatcaacaattcacatttaagtcaacactataactgtaattatttttattttaaccttttatttcatccattgacacgtcttgacgtaaatctacttgttctaatggaatttttttcgttttatatcgaagcttatgataaataaagaatgctaaaaatactgggattcccatatacgtaattaagaagcgactaaaattaaaatctcctgttttaataaagtcaacatcttgaccaataattactacaatacataaaaagccagcaaataatggtccgaatgggaataatttagcagtatattttaatttagatttgtcataattttgtttatcaaatgctcttctaaatcgataatgacttactgctatacctacccaagcaataaaaccagttaaaccacttgctgcaacgatatattcgtatgcaccttttgtaaggctttgtaatacgaaaattatcactacaatgattgctgtaacgagtaacgacatatatggcacaccgtttttatttgttttaccaaatgcttcaaacgctaatttatctttactcattgaatatagcattcgagttgaagcatacatacctgagttacctgctgataacacagacgttaaaatgactgcattcataaatgatgctgcaaacgcaaatccagcatttttaaacactaatgtgaatggagacgttgctacattatcactaccacccattaatgcactactatcataaggaattaacataccgataacaaaaatggctaaaatgtaaaataataaaattctccagaatacttgtttaattgctttcggcacagcacgttcaggattttctgattcaccagccgtaataccaattaactcagtaccttggaatgagaaaccagcgattaagaatacacctagaattgataataaacttcctcctaagttgccaccaagaataggaccttcacctttattaaatatttcgaatcctacaacatgaccacccatgattccgacaatcgttaataaaccaattgcaatgaaaacaataactgtaaccacttttatcaatgccaaccagtattcactttcaccatagacgcgaactgataacgaattcagactaaaaattataactaagaacaacgcactccatgcccaagcgggtatgccttgcaatggtgtccaatattgaatgacttgtgctgcaatcgtaatatctgctgctacagttactacccagttaaaccaatagttccaaccaagcgcaaaccctaaagatggatcaacaaatcttgtagcatatgtactaaatgaacctgatactggcaaatacgtagccatttcgccaagtgacgtcattaagaaaaataccattattccgataattgcgtatcctattaatgcacccaaagcacctgcatcatgaattgctccaccagaagttacaaataaacctgtaccaatacaacccccaatcgcaatcatagaaatatgacgatctttaagtccccttttgacaacattgttactttcattttgaacttttgacatataagctccctttccatgttttagaggccaagaaataaataacctttattcactttcatacccttttttacagaacatagtgatattaaaagtaaaaaagtggctacatacctttaagatatgcaaccactttggcaattatctatataaggtagcacatcacattctgtgacagtacagttcctattcgaaaactgtcccaatagatataatttatggtttatatctatttcggcatctttacctttcacttgttcaacttatgtaccataaatacttctgacaagttactaattaaacatgcaacctctaactcaatttaatattttaactaacttgtaatatacaggattcatcacgcataatcaaccctgtgaaacttgatacgcaataaaaatttcaaagcattttattgcgacaactgtctatctatgtttttttaaacgaatttcatcaactagattccagataaattcatctttttcaactgtttcttggtcttgcgatccatattgacgcacattcacttgattattttcaacttccttatccccaactacgatttgataaggtattttttgcatttgagcttctctaattttataacccattttttcattacggtcatcaatacttacacgaacgccttgagatttcaattcatcttgtaattggcgcgcataatcataatgtaaatcaacgttaactggaatgatttgaacttgttttggcgctaaccaagttgggaatgcacctttagtttcttcagttaaaaatgctacaaatcgttccattgttgatacaacaccacgatgaataacaactggacgatgatgttcaccatcttgaccaatataagttaaatcaaaacgttctggtaataagaaatcaagttgtgctgttgataatgtctcttctttacccatcgctgttttaacttgaacatctagtttcggaccatagaatgccgcttcaccaatcgcttcttcgtacgataagccaagctcatccgctgcctctttaagcatattttcagctttattccacatatcatcatcatcaaagtacttttctttatcttcagggtctctataacttaatctaaagctataatcctcgaaaccaaagtctttatacacatcaataatcatgtttacaacgcgtttgaattcttctttaatttgatcaggtcgaacaaagatatgtgaatcatttaaagtcataccacgaacacgttgtaatcctgatacagcaccacttgcttcatatctatgcatcgttcctagctcagcgatacggataggtaattcacgatatgaatgtggtttattcgcataaatcatcatatgatgtggacagttcattggacgtaataccatagattcagtttcatctaactgcattggtgggaacatatcttcttgatagtgatcccagtgaccagatgttttgtataaatcaacattagcaagtactggtgtataaacgtggtcataccccatgctcacctctttatcaacaatgtaacgttcaatttcacgtctaattgttgcaccgttaggtaaccataatggcaaaccagcaccaactaattggctatttgtgaataattctaactctttaccaattttacgatgatcacgttctttacgctcttctaacatttgtaaatgtgcttttaattcttttttatcaaagaaagcagtaccgtatatacgttgtaacattttgttgttactatctccacgccagtatgcacctgctgtagataatagtttaaactctttaattttagctgttgatggaacgtgaactccacgacataaatcagtaaaatcaccttgactatataatgttacattttcatcttcaggaatcgcgtcgattaattctaatttgtattcatcattgctgaataactctttcgcttcatctcgtgaaaccacttttcgttcgattttcatattttcgttaacgatttgtttcattgttttttcaatttgttcaaagtcatcagatgagatgttttggtcaatgtcgaagtcatagtagaatccaccttctattacaggacctacaccaaatttaacattaccatataaccttttaatcgcgtgtgccattaaatgtgcagtagaatgacgtaatacctctaacgcttcttcactacctggtgtcacaatttcaattgatccatcagtttcaagcggtttagttaaatctacaagttgcccgttaaatttgccggcaacagcttttttacgtaatccaggactaattgattgtgctatatcttcagtagtagtacctttatcaaacgcctttttattaccatctggaaattgaatattaatttgttccatgttaaaccctcctatttgctttataaatacttttatctgacctcgttaaaaaattgaacaacaatcatcgttttaacattaaacctattaacaataaacagggaatttatgacaccaacaaacatttatgtctgaaaaaaacaaaaaatcccgcccctatacaagggacgagatcgtcgtggtaccaccctagttatctaatacaatttatgtattaaatatctctgcttaagataacggtcttgatccgggtattcattacaaataccataaatgaagtagtaatcatctaatttattaaccatattctcatcaaacaatggctttctgtgtaatattgattagatcatcttgtcttcaatcatttaaacgatttagatttgtattcattatacaccaatcattttaaaattcaattgtttctgaaattttctcctgataaaaagtatggtgttgacaaagatttgacacgttcaataatacgtgctgctttagtcttctcttcaccatcacgagtcatcgctaaatgatgttccaattcactatagtcaaaattagaactaaagaatgttggtaattcatgaaccattcgataatgtagcaaaggtccaattacctcatctctcacccatggagtcacttcttcagccccaatatcatcaagcattaaaatgtttgcttctcttacgcgatgtaatttcttttcaaaagaaccatctttaaagccaccttttaatgttctaataaattccggtaaataaataattgtcgaacgtaccttcttagatttgagctgattcgcaattgcacctagaataaaagatttacctgtcccaaatggaccataaaggtaaaggcctttcacttgttccccattagttattgctgtacaaatatcatctgctgccatagctacatcaagacggtctcgatgattcatataaatatctttcaatttggcatttaaagtatctcgttgcatatgatgagatgtaattagctcagcttcaaagcgttcttcgtcgtacttgattttacacgggcattgtaaatagcgtattttaattcggttattatcaacatataactcaggcacatgcccctttacgaaatttggacaatcagcaaatttatgaccgtcataatgtttttgttgatctttatactcttgtaacacatttaagtcttcatcaatcatagcattcgttaattcagctcgatgcgcttccaaaaattgcttaacatctgggtcattgattacttctttttttatcttttctattcttttttcaaagtcctgcgacgtgttaattatacttttaaattgcttcattattgactgtcctcctcccattttttagataatttatctagaaatgcttgtcgatcttgctctaattgttgatcatctacgctattatctttagccgaatcttcttcactaggtttatctctattttctaaccatttaggtgttttttcttttgaaatacgattacgttgcccatagtatgaaccacgcttttggtaattttcgctagaaccctcatttttaagttgattaacttttttagcgtaattatatgcttctttagctgtcttaataccttttttcttccaatttgatgctatttccaaaatatacgctttaggaagtttcatatcttcttttaacatgacaaattgcaacaaaatattaatgacgccaaaagacattttttcacgttcaattaattcttcaaccattgtcttttgcgatatagttggttctgattcagaccaagaagctaacatatcaattggactcgtttgttcaagtaactcaaaccattcatcactttgtggctttggattcacttctgaagatttgcccgtcgaagatgatgtagcaggagatttcacctgtaatttaggcatttgattttcgtgttccattaagtaatacgagcgtgcttgtttacgcatttcttcaaaggataactgttgtccacttgtaattgaatttaaaataacatgcttcatgccatctgctgttaaaccatataaagtcgcgagttgtgtaattaaacgctttgcatctttggtaacaatgtcttgactaataaaatgtttacctaacatttgtctcaacatttcaaagtcaaaagattcatttgataaatcgataccttggtacggttcattaatcggaatatcacttgtatccatatctatttttgtagacggcactttaaaaacatcagtaaattgtcttgttacctgtttaaattcactcaaatcaatttgttgatactcaaagtatttcttcaactcatgaaatcgacgatgctcgacttcactatataaaaagattgacaacattggatcattaaaaaataaatgtgctgaaggcggttgaattaattggtaaacaaattgtgtttcttgttcatcatgtttgacaaacgcctttaacaatccaatcgcttcaagtaagtccatttgttgtctaaactctagtaaattaattttaagttcattcataaaaatataatgagaaagaatcaatgtttcattatgactttctttaacgaattgagtcataaaatgatataaacccactgcttgcgttccaattagcggtgtatacagtcgattcaatacctctaaatgattcgtatttaaatcaaagtgttgcataactttgaattgatccttcggtcttaagccgaattcgaaggcttgtcgtcccatttaagcatcactccgtttgttttcgcttaaaatcccttgcatcgatgctaacaattgatcaacatctttaaattctttatagactgatgcaaatctaacatatgaaacttgatcaacatgcattaacaagttcataacgtgttcacctatatctcgtgaagacacttccgtatgaccttcatctcgtaattgccattcaaccttgttagttatgtcttcaagttgttgatatctaactggtcgtttctcacaagaacgcacaagtccattaagtatcttttctcttgaaaactgctctcttgtgccatcttttttcacaactataagctgactaacttcgatatgttcaaatgtagtgaaacgtgttccacaattttcacattctcttcgtcttcgaatggcatttaattcatcggcatgccttgaatctacaactttagattgtgtagaattacatttcgggcatttcattacatcaccctctttattttgattatgcctaattatactataaatctagagatgaaaaaagaatccctcaatttaattcatttaaccaaataatgaaacaataaaaaacattatatcgttacttattaagtaatttgcatgacaatattattgtattaaaaaataaaaaacctaactccgaagtcagagttaggctataaattaattgtattaacttgcacttacagtttcttttgatgtcaaaagtgctccaatttgctcagcaacatctacaactctatttgaataaccccattcattatcataccaagcaataacttttactttattccctgacatgaccattgttgattttgcatcaataatagctgaatttggattagtattaaaatcaacagacactagtggttgatgttcgacttctatgataccttctaaacctgcattttcaaaagcttggtttacttcttctgcagttacttctttttctaaatcaacaactaaatcaacgagcgatacattctttgttggtacacgtaatgccatgccgtgtaatttaccttctaattctggtaatacttcttttaaagctttcgccgcaccagtagaagtaggaataatgctttcattacatgagcgtgcacgtcttaaatctttatgtggattatcaatatttttttggtcatttgtaatagcgtgaacagtagtcattaaaccattaactattccaaactgattatttaaaacttttgcaactggaccaatgcaattagtagtacatgaagcattactaaaaatgtcaaatgcttctatatctaattggtaatcatttacgcctttaactaccatttgaacatgtccaccttttgaaggaccagttaacaaaacttttttggcacctgccttaatatgtgcgatggctttatcaccatgattaaatttaccagttgcatctatagcaatatcgatatctaattctttccatggcaagttttcaggattgcgatcagcaaccaatttaattttatgatcaccaacttgcaatccattttcaatcggttcaacttttagattatattttccatgtgttgtatcgtaattgattaaatgtgcaattgtttcgggtggataactagcatttatcgctactacatttaaatttttattttgtaatgcaatacgtaataccattcttccaattctacccataccattaattgcaatattcgttgacattaaaagcaccccttgatttttatgtgttatactttatggaattagtatagcatattatatgaaatttgaaagcgttttccgttgatttatttatcttttttataaaaaatagtcattacttacatacatcaacgcgtacgtaaagtaatgacttatttatagtgtaatattaatcttcttctccgtaattcggcttttcaatataaccttcttcttctaacaatctctcaaggttttgttttaattcaagtttatcccctaaattatcgataacatgatcggccattcggctttttttatcaatagaaatttggctatagacacgtgctttcgcatcttctaatgacaaattattacgttgcattaaacgatccatttgtatactttcagaagtgtatacaacccacacttcgtctactgtattttccaattcattttcaaataataatggaatatccatgattacattatatccttgttttaaatattcttgcttttcttcttccataatatctcgcacgataggatgaatgatagcatttaattctaagcgtttttctggatgattaaacactagatcacccatataacgacgattcatctcaccattttcatcaattgcttcatcaccaaagacttctcgtacttgagctaaacctttactcccctttttaacagcttccctggctgctttatcagcatctactactttaaaaccgaatacggataagagttctgatactgttgattttcctgaggcgattccacctgttagaccaataactttcggcataatttcactctttctttatttttgacatactggacaataatgactatttcttgtcgcgatgatttttgtttcaatttgacttccacacactttgcataccggctgcttatatacattaagatgcaattgcatctcaccagtttttccatcagcatgacgataatctgaaatacttgtaccgccatatttaataccttcttctagtacttctctaacataataaaaaaccatttcttgttgttggtgtgttaagtcttttacttttttatctggtaaaacacctgcacgaaacaacgcttcacatgcgtaaatatttccacaacctgcgattactttatgatccaaaatcacttgtttgattggtttattcttattagactgttgatgaattcgatttaaataatacgtcaatgcttcatttgaaaaaggttcaggcgctatttctaaaaatgaaggataagatgctacagacgcaacatttctaatttctccaaaacgacgtatatctgaataaattaactttttgtcatttgacaactcaaaaataacatgccaatgcttacgataattaggtatcataatatcttcaagttcatctacaatgaaaaaaccacccgccatacctaaatgactaattaatgtacgttgttctcgtttattatctagctgaaaaacgatatatttacttcttcgttctacatttgtaatggtatagccttccgataaagttttaaaagtatctaattcaattccttttataattgtttccttgccttgagctttaccttcgattactttatccgaaaatataacgtgttcaattttttgatttataacgtagggttcaattcctctttttacatgttctacttctggtaattcgggcataccattaacctcactttattttgcatcataccaagttgcaccataacttgagtctacttttaatggaacatctaattgcaatgcattttccattatctcttctacaaattcactaaatgaatctacttctgacttaggtacttcaaaaattaattcatcgtgtacttgtaataatagtttagcttgatatgttgtctctttcattttttgtgcaaatttaaccattgccagtttaatgatatctgcagcactgccttgtattggcgtattcatagcagtacgttcagcaaagccgcgtaaattaaagttacgactcgtaatatcaggaatatagcgtcgacgatgtagcaatgtttccacataacctaaagctttggcatcttttacaatatcagacatatattgttttacacctgggaaactagctaaataatcatcaatgaatgcttttgcttttttacgagtaatacctaaactttgacttaaaccataatcacttatcccataaacaattccaaagttaaccgcttttgcttgacgacgcattaaactatcgacttgatcagcctctacaccaaatactttcatagcagttgctgtatgaatatcatcgccgttgataaatgcttctttcatactctcatcttgtgtaatgtgtgctaatacacgcaattcaatttgagaataatctgctgataatataacgctatcttttgaagttggtttaaaggcttttcttattttacgcccttcttcaagtctaaccggaatattttgtaaattaggatctacacttgataaacgtccagtttgcgctaaagtttggttaaaacgtgtatggatacgttgatcatcactaattaccttttgcaatccttcaacataagtagactgtaacttagataattgacgatattctaaaatataatcaatgataggatgttcaccttgcaattgctctaagacatctacagcagtagaatatcctgttttcgtctttttaataacaggtaattgtaatgtctcaaacaatacaacacctaattgcttaggagaatttatattaaaatcttcaccagctgcatcatggatatttcgaatcaagacgtctaatttttcttgaatttctttttccatttcttctaaatcatgaacatctgtaaatataccaatttcttccatttcacttaaaatcttagctagcggtagctctaaatcagctaagagttctacctgattgtattcttctaattgtttatccatatttggtttcgcaaagtaaattgcatcagtaatagaagcaacatatggatttaaaacatcatcttcaggcaccttaaatttcttaccttttccatatatactcacatcgtctttcacaaaactttgaccgtacaatgaaacaactgattgaacatcactaatcgtacgcgatggatcaattatataactggccaacataatatcgaaagaaatattttgaatatcaattcccaatctatgtgatgctacatatgtttttttagcatcatatactacttttttcgtattcggattttctaaccatgaaactagttcggcataattatttatgtcatccgcattaattacaatatgtttctcacctgtaaataaagagaatttcaaaatattatttcgcaaatagttaccaccgtctaattcgaaatggatggccgcttctttcaatgaagtaaaatcaatattatcaaaagacgtttcaatttcaaatgtcttttctattgcatcttcaacacttgctgattgatcaatgtcagccaacaattgtttgaattctaacttcttaaacaattcgattttttcttgttgttcatcttgatgagtcattaacgtatcttcaagttttacttcaatcggactatctacattaatcgttgctaattctttactcattaatgcatcttctttgctattttgaagtttttcttttaactttttacctgaaatttcatctaaatgttcatagacaccttctactgtgtcaaattggtttagcaattttattgctgttttctctccaacacctgcaacacctggtatattatcagaagtatctcccattaatcctttcatatcaataatttgattaggtgttaacccgttgtatttttccgcaataaagtcaggtgtataatgatcaacatcagtaacaccttttttagtgtaataaatggttacattatccgttgcaagttgtgttaaatctcggtctcccgtaataataattgtctgaaagcccgctttatctgcttctttacttaaagttccgataatatcatctgcctcatagttatctaattcataacgtttaatatgataagcatctaataattggcgaatataaggaaattgctcacttagttcaggcggcgttttctggcgtccacctttatattcactatatttttcatgtctgaaagtcgttttacctgcatcaaacgctactaaaaaatgatttggcttttcttcttttaaaatcttctctagtaacattgcaaaaccatatactgcattggtatgaatgcctgctttgtttgataacaaaggtaatgcataaaaagctctaaaacttaagctattaccatcgattaatactaatttattcacaattttaacctccagaactaatttatatatattttagcatattcgactgtgatgtcgtaattaaagaaactatctcatagagtatttatacacgacctaatttcaaataaaacaagtgcctatatagacttagctaaaaaataaaaaagacataatcatgattgttcttgatgagcactccataaagtcaggttaaaagtccaacttttgagatgcacattaacatttcatgattatgtctactttttaatatttttatgctgctattttaaatttttataggtaagaataagttatgaatcgtctgaaccaaatggaatatatttaactttggtcattttcggtaattcttcataattattaaaccactcttggtaatttttattgattggtgacggatgatgcatataatgttcaaacggcaatgattccactgtataaacctcttgtcgtggatgatctttaatttgttgttttaataactgaactcttttttcatgttcataatgaacataaataaatgcactaagatatataacagctaaaactagtgatgcacctttaataaaattaacattgattgacttatatttccgaaattcttttaataaaataattaaaatgattacatgtatcgtataaacaatcaaaaaattacctggttcaattggagtaacaatgactagtgtcgacgccgaaacacatattgcaataagtaaggaatataaagtaatttgtgttttacgatcattaatagacaaataaatacctacaaatatcgaaaacgcaaagtaaccacatacaattacgttcacaaaaccaaccaatccaatatctgtatttttatttaataaaaactgattgtaaaatagtaaataataaagcggtaaagtgataaatcctatcataatgatacgacgctttaatattgttaaatgtacataccgatcacttctaagcagtagataaataataagcgctgcaatcatacttaaaattataatctgactgaaaatgacaccatatggaagtgacgttgatatcatttctgcaaattttgaaaagataccttgattatttgaaacttgttgatattctgatccttcaaataaaattttgcgataatttggattggaaaacataatgattgtacctatagtagcaatcataaatgaaaacaataatttataattaagtgttcgatttgcagtaaattcatatagaaaagctaaaattaaaatgatacagtggaataatgtcacattctccataaataattgaccgaagaagcataaaacatagaatagtacagtaacacttaccggctgcttttctttatatataattgcattaatacaataataaataataaagagtgaaattagtgttgatgtcgcataattataaaatcctgcaaaccagccatatgtatctgcataaatagcacttggtaaaattaacattaaagaaaatgctaacaaataatagcttgtccacgctttacaacgtgtaatgtgcataatcatccaaatgatgcccatactaatgagaccatatgaaagccaacgtaaccagcttacatgtacagctataatttcaaagatatttccgatatagcgaccattaagtgatgcaaatcctacttttaaaatatcagtattataattgctaaaccattgtaaatcatcgtgcatgagtggtagtaagatacccataaaagtataaaacaataatatcgcaattaatatcaaagttgtcttgtgtaattgaattgttttcactttgctaatcctcaaatctagttaaattttcctcaacttgtaggtcgaaaaattaattcaatatttttaatgtatttctaattttcacctatgcatgtttcctcaatcaaattagataaacaaggtatttaatattactttcaacaatttatctaaatcgcccctcgtctttttctatgacgaatgattacacttgtctattcaagtgtttaaattaagatttatttccgttcaaataaaacttattactttttaattaagcatctattttaagcgcgttactaaaatttctttattataataaatatattataaaattgcttgattcacaacaatctattacttataacttacaaatcgacatatgcaaatgacaaaattgacaaccgaatttattccacttcattaactctaatttaataccaatagagatttgaacgaaataaaaaagcagcaacaacttcgtgaaaaatacacgcgctgttaccactttaatttttattctttataatcttttagaataactttgaacgttgagcctttgccaacttgactattcacttcaatattgccttggtgggcctctactatatgctttgtaattgataatccaagacctgtcccaccagaatctctacttcgtgctttatctactctataaaatctttcaaaaatacgttgttggtcttctaatttaatacctataccaaaatcttgtacttcgaaaatgacacgaaagtcatctcgatacacacgaacgttaatatctccatcttcataagaatagttaattgcattcgttaacaaattcgtgataacttgagcaattttactttcttgtgctttaacaatgacatctttttcaatatcagtatgaatggaaatatttttttgattggcttgagtcatcatattatcaataatacgccgcgttaaatctgataaattcatatagtctgtatctaactcggtatgttgctcaatatgcgataaatctaacaaatctgttactaaagattctattcgatttgattcttttaaaattatgtttaaaaacatgtctaatgattccgcatcattttttgcaccatcaataagcgtttcagcaaaccccttaattgaagtaataggtgtttttaattcatgtgaaacatttgctacaaattcacgtcttagattttcaagttgtttcagatttgttatgtcatgcatcacaactaaaatcccttgcaaacttttttgagacctagttaaaatcggaacgcatgaaatatcaaagtacttggcatggacttggtttattgcaacttccaattgttcataaataggtttttcaactttaaaactttctaaaattaattgctcaatttcagtattaacatagccgtgatagcctacttgttcaatattatgcgagatgttgaactgttcataatacgctttatttgcaacaacgatttttccatttcgatctatcattaaaatagcacttggaatattttcaatcgttgtttttaaacggttggattgaattttttgctcattattaagcttttgaaggcgtcgtgctaaatcattggtagacacaaaaagcgctttagtttctacaacattactttcaggtacacgtatgtgataataaccatttgccaacaattgtgttgcataagtaacttcttgaatgggacggattaatgtacgcttaaaactacggcttgcaaaatacagacaaatgagtacaactaaacatgtcaaaataagatatttccacaacgtccaatgcatttctgtaatatcgttattgtaacctttaatccatacatgataaccgttaaccttcttattaaaaataaaaacgtcccttttttgaatatagctatcactatttgggatagctttcagtttgccactactaaacacctttttatcatgtttagttatcaataaatctatattttgctgttttacaatttctttaactttatcaatctcattatcttggactaaataaatatatgatcttgcatctgttgctagagcttgttcgtgtttttctgataaaacatatgtgatggaagcgtgaataataatgcctaatgtaacaaaactgataattaatatactgcttatcaataacattaagcggtggtgaaacttcatcattgttctttaggtctttccaatttatagcctaagccacgcacagttttaataagttgtggcttcttgggattatcttctaatttatctcttaaatgactgatatgtacatcaacaattcttgagtctcctgcaaattcataattccataccgtatttaacatatgttctctcgtaatgactctgccttgtctttctatcaaataaagcaagagttcaaattctttcggtgttagctccaataactcattatgcttatatacttcaaaataatcgggtctaatacgtatcgatccgatggtaatatcatcatcaatctcttctacttcttttacaaattgagaacgtcttaaaatggctttcacacgggcaacaacttctctaggtgaaaaaggcttagtcatatagtcatcggcacctaattctaaacctaatacccgatcaaattcatcatttttcgccgttaacattaatatagggactaaatttttatttgttcttacagtcttacatacgtcaatgccatcttttttaggtagcataacatctaaaataattaaatctggctgttcactttctaccttttctaaagcctcatcaccatcaaatgcgacaacaacttcataaccagctgtttctaagttatatttaagtaatgttacgattgaatgttcgtcatctactaccaacactttttgcgacatggtatgcctccctaacttataattatatttacattataaccgaactatttataaaaataacatcctacacattatctttacacattttttacattactttacatataaataaaatacttcttatatttccttctatcatttgcatgacttactctgggacaacgaaataaattttgtaaaaatagcatttctatcccactacctatgcatgagttttactcatttattcctaagcttatgtacatattcgctttgtctaatgtgtaagaaacactacataatcaatcattggtgactctttattatttctatcctgttgccaacttcaattcatttaaaaaggcgaacctagcaattaaagttgctagactcacctaattttattttgcttattttaaatttttaatcaattcatctgcaaatgctgatgtagaaacttcttcagcaccatccattaaacgggcaaagtcataagtaacaacttttgaagcaattgtatcttcaattgaatctgtaatcttatctgccgcttcttgccatcctaaatgttctaacattaatacagaacttaaaattactgaagatggattcactttatttaaacctgcatattttggagctgtaccatgtgttgcttcaaaaatagcatgacctgtttcataattaatgtttgcacctggcgcaataccaataccaccaacttgtgcagctaaagcatctgaaatatagtcaccattcaagttcatagttgctacaacatcatgctcagctggacgagttaaaatttgttgtaagaaaatgtcagcaatagaatctttaatgataatcttgccttctttttcagctttttcttgagcagcattagcagcatctctgccttctttttcaacaatttcgtcatattgttgccaagtgaatacttgatcaccaaattcagataatgctaaatcgtaaccccactgcttaaatgagccttctgtaaatttcataatattacctttatgaactaaagtaactgatttacggttattatcgatagcatattgtatagctgctctaactaatcgctcagttccttctttagaaactggtttaataccaatacctgaagtttctgggaatcgaatgtttgtcgcacccatttcgttttgtaagaagtcaattacctttttaacttctgttgtaccttctttaaattcaataccagcataaatgtcttcagtattttcacggaaaataaccatatcaacatcttgtggacgtttaacaggtgatggtactcctttaaaccaacgtaccggtcttaaacaagtaaataaatctaattcttggcgtaaagccacatttaatgatctaataccaccaccaattggtgttgttaaaggtcctttaacagcaattaaatattctttaattgtatcaagtgtttcttgaggtaaccattcaccagttgtatcaaatgctttttggccagctagcacttctttccattcaatgcgtttttcgccattataggctttctcaacagcagcatctataactcggcttgctgccttccaaatatccggtccaattccatcaccgataataaatgggataattggttcattaggtacgtttaatccttcagttccttgagtaattttttctgcagtcatagttattttacctccaaattttacatcttcatttttaatttgtattgattattttctttcttcaagcgggatatacttacgattcgtttcgccaatatatttcgctctaggacgcataattctattatctttatattgttctaaaatatgagcaatccatcctgcagaacgacttacagcaaagattggcgtgaataagtcatgaggtatttccatacagtgataaacactcgcactataaaaatcaacattaggaattaatcctttttcttctgccatacgtttttccattttcactgacatttcaaataattcttcacgaccagcgtctttcgtaatttgacggctcatttctcttaaatatttcgctctaggatcaccatctttatatacacgatgaccgaagcccattactttatctttattagcaaatttttcatctaagtaagcatcaacattttcaattgacccaatctcagataacatcgtcataacttgttcgtttgcaccaccatgtaatggccctttcagagaacctacagctgctacaatacctgagtacatatctgacaatgatgataccgcacaacgtgctgtaaatgcagatgcgttcaactcatgatcagcgtgtaaaataagtgctttattgaaggcttctacttctatatctgttggtaattccccacgtaacatatataggaagtttgccgcataacttaagtcaggattaggcttaagtggttctttatcttgtcttactcgagcaaacgctgtaactaatgatgctactttagcctgtatacgcattgctctttcataacgattttcatctgattcattttcagcatcaggatcgaaatgtgcaatatatgataatgacgtacgtaatgctgtcattggatgcacgtgatctgtaacatactcctcaaaatgtgtatacacacgaggatttaatgtcatgtattgatttaatttcccttttagatgagcaagctcttcttcgtttggcaatctatagttccataataggaaaataacttcttcaaattgcgcattttcagctagatcatcaatatcatagccggcataagtcaattgactttcaataattgaacttattttagtctccgctgcgataaccccttctaaacctctttgtaattctgccatgataaatttcccctttactgtttctttatgaaatggctttcaactaatattatagctaaacgcatttcgtttgtgaaatataaaaactggcattatatgtgcaacaatttttttgtaaatctatgtaaatgtcacagaatagccacaaatagcaccattaaagctttttcaagatgtgaataatccatgaattttacaatagaattaaattttcaattggttattatatatgattataaaaaccaaagtatattaacatggaattttacacatttttaccgaaaataattgtatatatctcaatataagtgcataataaacatatctatatttaagggagatgtattatggctgaaaaattacaaagggaactgagcaatcgccacatacaattaattgcaattggcggtgcaattggtacaggcttattcttaggtgctggtcaaacgattgcattaaccggcccttcaattctattaacatacatcattataggatttatgttatttatgtttatgcgaggtttaggagaaatcattatacagaatactgaatttaaatctttcgcagatgtaaccaatacatatattgggccttttgcaggatttgttaccggatggacatactggttctgttggattattacaggtatggctgaagtaacggctgtggcaaaatatgttagcttttggttcccagaaattccaaactggataagtgcactattttgtgtactgttattaatgtcattcaacctacttagcgcaagacttttcggagaattagaattttggttctctatcattaaaatagcgacaattattggtttaatagtagttggtttcgtcatgattctatttgcatttaaaactcaattcgggcatgccagtttcacaaatttatatgaacacggcatattcgctaaaggtgcttctggattctttatgtctttccaaatggcattattctcatttgtaggaattgaaatgattggtgttacagctggggaaacaaaagatccagttaaaacaattccaaaagcaattaacagtgtacccattagaattttaatattttacgttggtgcgttagcggttatcatgtctattatcccttggcagcaagttgatcctgataacagtccattcgtaaaattattcgcattgatcggaattccgtttgctgcgggcttgattaattttgtagtattaaccgctgctgcttcatcatgtaacagtggtatattctcaaatagccgtatgcttttcggtttatcaagtcaacaacaagcacctccgaacttttctaagacgaataaatatggcgttccacatgttgcaatctttgcttcatcagcattattacttgtggcagcattactaaactatattttcccagatgcgacaaaagtatttacgtatgtgactaccatctctacagtgttatttttagttgtatggggtctgattatcattgcatatatcaattatagtcgtaaaaacccagatctacataaaaatgctacgtacaaactattaggtggcaaatatatgggctacttaatatttgtattcttcatttttgtgttcgggttattatttattaatgttgatacaagacgtgcaatttattttattccgatttggtttatacttttagcatttatgtacttaagatataaacgtatcgctgctaaatcaaataaataacaacaagttttacccctgttgaatatactaaagttcaacaggggtttttatatgcaacttataatattaaattgcgtacttggctcaaaacttttactttctcatctatttaataatgtatcatttcagaaatacatccatacttctattttataataaatttccaaagtaatatgagtgaaagtttgaaggtgataatgtacatgtataaaagatataaatatttatatagattgccattcatacactatcattatcaaataacctattaattacgtcataaaataccagatgaaccaaaaaacgcctttccattgttgataaatggaaagacgtttttttataaattatagtacgtttgcatatccttcaaagattttaccttgagcagcatcaatcgtaactaacatgttattgcttatgtttttaacagctttttctacacctacaactgttggaatacctttttctaaaccaacaattgcacttggtgatgtaataccattttcttctgtaattaagcctaaagctttttctacataaggtacaaacgtttcatcgattgagttagtaacgataactttgtcagataaatctttaccttctaaatctttaacagtttcagcaactaacgtagtaccaacaactgatccacgtccaataccttgaccattagcaatttcgtcaccaactaggtggattttcatcatattagtagttccagtttcaccagttggtacaccagcagtaataatgattaaatcaccattagatactctaccagtttcaacagctgttgcaactgcattgtttaacaatgcatctgtactcttacgtccttttttaactacaggttgaactccccaaacaattgaacattgacgtgcagtttcttcacttggagtcaccgcaataatgtctgaatgtggacgatatttagagatagtacgtgccgttgaaccactttcagtagcagctacaattgctttaacatttaagtttaaagctgtatgtgcaaccgaaataccgatagcattcactaatgaagtttcaactaatttagtacgatctgacaataactttttgtaatcttgggctgcttcagctgatacagcaatattcctcattgttttaacagcttcttcaggatataaaccagcagcagtttcaccagataacattactgcatctgtaccatcatagattgcgttggcaacgtcactagcttctgcacgtgtagcacgtgggttacgttgcatagaatctaacatttgtgtagctgtaataactggtttacctaatttgttacattgtctgattaaatctttttgaaccattggtactttttcaggtggaatttcaacacccatgtcaccacgtgcaaccattaaaccatcagacacttcaagaatttccgcaatattatcaataccttcttggttttcaattttagggaatactgaaatgttagctttttgttcttctaaaatttcacgaatttctaaaacatcactaggacgacgtacgaaacttgctgcaatgaagtcaacattttctttaataccgaaacggatatcttcagcatctttttctgtaataccaggtaaacttactcttacgccaggtaagttaacaccttttttgtttttaagctcaccagagtttaaaatatcacatttaacttcttttttagcatggtcaatatctttaacttgtaattcaattaagccatcatcaagtaaaatgtatgaacctacttgaacatcgttaattaagttttcatatgttactgagaacttttcaggtgttccttcaacttcattcatgctaacaataacttcgttaccacgttcaagttcaatgataccgtctttcatattatgcgtacgaatttctggaccttttgtatctaataaaattgctacaattttgtctaatcttttagctactttacgaattgtatcaattctacctttatgctcttcatgactaccatgtgaaaagtttaatcgtgcaacgttcataccagcattgattaatttctcaatcatttcttctgattctgaagctggtccaattgtacatacaattttagtttttctcattttataattcctcctgaaatcttatatagataacttgttagcaagttcatatagactataatcaaatttatgatctttaccatcaaaaatttcatcaaaagatgttgctacaattttattgttcttaattccaacacccttagctgtttcaccttgcattaataagtctaccgcatatccacctaaacgtgatgctaaaactctatccgcacctgttgggctaccaccacgttgaacgtgacctaacacagacactctattatcaacattgatgtattgtgataattctttttgacaatcttgcgcagtcatacaaccttctgctacaagaacgattgagtgtttcttaccacgtttaataccttgttcaattttatcagctatttctttaatatctgttttcacttctggaactacaattgtctcagcaccaactgataatccagcccataatgctagatctccacaatcacggcccattgcttcaatgataaatgttcgtgcgtgacttgacgcagtgtctctaattttgtcgactaagccaataatcgtatttaatgctgtgtcaaatccaattgtaaaatcagtaccattgatatcattgtcaatcgtaccaggaataccgatagtttgaatttctttgcattcctcactgatgcgttgtgcaccgcgataactaccgtcaccaccaataactacaaggccctcaatccctcttttacgtaagttttcgattgcaactttacgtacttcttgctccttaaactctggacatcttgctgaatacaagaatgtacctccacgctgaatcgtatccccaactgaccctaattcaagtttatgaatatcatcatttaacaatccttggtaaccatgatacacaccataaacttcaatttcattgtaaattgctgtacgaacaactgctcttacggcagcattcattccaggtgaatctccaccactagttaaaactgcaattttcttcatgacgacatacctttctataactgatttatctttaactctaaattaccacaaattgatatgtcattccatcaaaactaatgtattgaattgatgtaaacgttttaaatattgaattttattttaacttaattaaaaaaagattagtagccacaattttgactactaatcttagttaaaattcagtatctaaatattaaattattgttttaatgtacttcaatttatggtaaaacccagtatcgatttaacataaaaatgctcaagttgattattctatataagaaccgatatttctgaatttttcaaagcgatcattagcaatttcatcacgtgataatgactcaagtgaatctaactgtgcaacaaacgctgatttaatagctaaagcttgctgttcaacatctttatgtgcaccgccaagtggttcagaaatgacatcatctataatacctaattgcttaatatcatgagcagtaattttcattgtttcagctgcaattttagccaaattactgtctttccataataatgccgctgcaccttcaggagatataacagagtaagtactattctctaacatcaatactttattggcaataccaatacctagggcacctccactgccaccttcaccaataacaatcgcaataactggtacttttaatgaagccatctcaatcaaatttgttgcgatagattcactttgtccacgttcttcagcagctttaccaggatatgcaccttttgtatctataaatgtaaagataggacgattgaatttttcagcttgtttcattaaacgtaatgcttttcgataaccttctggatgcgccataccaaaatttcgataaatattatcttttgtatcttttccacgttgttgtccaataactgtaacagcacgaccatttaaaaagccaataccaccaatcattgctggatcatctctaaaattacgatcaccatgtagttccataaacgaatcaaagatatatggaatataatctagggtcgtaggtctttcttgcaaacgcgcaatttgcacacgatcccatggttttagatttgtatatatttttttagtttctcgttccaatgacgcttcaagcatgtcaatttcttcttgtaaatccacatcatttttatcttgagattcttttaaagattcaattttatttcgaatttcaaaaagtggtttttcaaaatctaacattatttagtcacctcttgatggatttttagaatttcagacaatgtttgacgcatatcattacgatgtacaactttatccaattgtccatgctctaataaaaattctgcagtttggaaatcatctggcaatttttcgtttattgtctgttcaataactcgacgacctgcaaaacctatcaacgcttttggctcacttaaatttatatcaccaactgatgcaaaacttgcagatacaccaccagtagttggatgtgttaaatatgatatatataatagtccagcgtcagaatgacgttttaaagatacactggttttacccatttgcatcaaggaaataataccttcttgcatacgtgcaccaccacttgcagagaaaagaataaatggtaaacggttctcagtgcagtaatcaatgatgcgacatatcttttcaccgataaccgatcccatacttcccattctaaaacgtgaatccatgacagcaacgccaaatttcataccatctagttgcgctgtaccagtcacaactgcttctttaagacctgtcttttgttggtccttttcaattttttctaaataacttggaaaatctaatggattcgcagaggtcattcccttatcgaattctgtaaatgatccttcatcagaaattgcttctatacgtttatacgcagttaaagcaatatgatgatcacaattaaagcacacatttaaattttcagctaattcttttgtgtacataattttcttacactttggacacttagtcataatacctgcaggcacatcattatttttagagtcttgtactgtaagatatttctttttctttgttcgattaaaaaaatctttaaacataggaaaacctccaaataacctctgttctaaccatttagagccttaaactgaacttgaccagttaaaaacgggtttaaatttatttgatttatattcgtttgactgttgaatgtttatcataaactttcattttcatcattttaatgactctttattgctaacttttaagcaatttaattaaacgttaattatttttattgtaaatctgtaagtttcattgttttatcatacacatcttgcggatcaacttcaatcctagctactccagattccattgccgctttagcaacattacgagcaactgatggcgctacacgtttatcaaacggtcctgggatacagtagtcttcatttaattcagaactatcgattaaatcagcaatcgcttctacagctgcctttttcatttcttcatttatatgtgtagcttcaacctctaatgcacctctaaaaataccagggaaagctaatacattattaatttggttaggatagtctgaacgtcctgtaccaacaactcgtgcacctgccgctttggcatcatcaggtattatttcaggatttggattagccattgcaaatataattggattatctgccatactcttaaccatatcttgtgacagcgcattagctacagaaactccgataaatacatctgcgtcttttacgacttcttctaaagacccttcaatcttatctttatttgtccatttagctacaacatctttcgtaggattcataccatatgaacgtccttcaaaaattgcgcctcttgagtcacacataaccatatttcttacaccatacgcgtatagtaatttaacaatggctattcctgctgcaccagcaccatttagtacaacttttattttagcaatatctttgttaacaactctcaatgcatttaccaaacctgccattgttacaattgctgtaccatgttgatcgtcatggaataccggaatattagtttcttttttcaatcgttcttcaatttcaaaacaacgtggtgccgaaatatcctctaaattaataccaccataattaggttctaacaacttaactgttttaatgatttcttcggtatcagttgtatttaacgcaataggcaccccattgataccagcgaagcttttgaataatactgctttaccttccattacaggaatacttgcttcaggtccaatgttacctaaacctaataccgctgttccatcagtaataactgcaactgtatttcctttaattgtgtaatcatatacttttcttttatcttcataaatatctttacacggttcagcaacgccaggtgagtatgctaaacttaattcctctttattagtaacttttacatttggtttaacttctaatttaccttgattacgtttgtgcatttccaatgcttcatctcttaatgacatgaaatcagcccctaattcaatatttatttttaaaaaataacttggataaaacgcattacattataaaagtaaaaatattgggtaaatctgaatgagtaagaatttatggttttgattatgtaacacaaatagcgataaacgataataaaataatatttataaagatacattaaaccatactatctaaagatatacctttaattattataatggatagcaaaaaccaatatatcaaaaagttattatttttccgcacgatatatcgacaaaattctttactcaatttatgtatactgctttttgtgctaattattcttatggattaatcaataatgtaaagtgaaactcataaaaataataagcataaaaaactaatataaacgcaaactgatggttaaaaaatatctaaccatcagtttactatatcataatttattagttgataaaagttatataagcctaatatcactagggttaaaggattgtataaaattattaaacatactatctttttgattaatatagcctaaagtagtcatttgtttaatcgtttcatcataaaaggataacataacatcattagcattctctttcgtagctttaatcatctcttcaaacatatctatttgtgatttatttctaattataatttgtttggcaaatgctaatttttgttcttcaaaagtggctaatgtttgaatctcatttataattagttgccgttgttgctttctatggtcaaatttcccgctaactataaacaagtcattatgtgataacaactcttcgtactttttaaactgattagggaaaatcacaccatctaaagtttcaatgccatcatttaatgtgacgaatgccatattttgaccatttttagttcgaatttgtttaactttatcaaactgtactaatataggtttattattctgcgcgttactcaatttaaatatcgttaaatattgtttggcaacaaactttttatctactgggtgttgcgaaacataaaatcctaaatattctttttcgtactgactaataagtgcatcaggcaattcttctttatcttcatacatctgttttggcgttaaaatatcaaataaaaaaccatcttgttcaatgtttaaatcgccatccaacacttgatcaatagcttgcaacaacgttgaacgtgttttaccaaaagcatcaaacgctcccactaaaatcagtgcttcaagtaactttctcgttttgactctcttcggtatacgtctagcaaaatcaaagaaatctttaaatttgccgttctgataacgttcatcaacaatcactttcacactttgataaccaacacctttaattgtaccaattgataaataaatgccttcttgggaaggtttataaaaccaatgactttcgttaatgttcggtggcaatatagtgataccttgtttttttgcttcttctatcatttgagcagttttcttctcacttccaataacattacttaaaatatttgcgtaaaaataatttggataatggacttttaaaaagctcataatgtatgcaattttagaatagctgacagcatgtgctctaggaaaaccataatctgcaaatttcagaatcaaatcaaatatttgcttactaatgtcttcgtgataaccattttgctttgcaccttctataaaatgttgacgctcactttcaagaacagctctattttttttactcattgctcttcttaaaatatccgcttcaccataactgaagtttgcaaatgtgctcgctatttgcataatttgctcttgataaataataacaccgtaagtattttttaatataggttctaaatgtggatgtaaatattgaactttgcttggatcatgtcttcttgtaatgtaagttggaatttcttccattggacctggtctatacaaagaagttacagcaacaatatcttcaaagtgttccggctttaatttttttaatacacttcttacaccgtcagactctaattggaatatgccagtcgtatctccttgcgacaacaattcaaacactttttgatcatcaaacggaatcttttcgatatcaatattaatacctaaatcttttttgacttgtgttaagatttgatgaataatcgataagtttctcaaccctagaaaatctatttttaataacccaatacgttcggcttcagtcattgtccattgcgttaataatcctgtatcccctttcgttaaaggggcatattcatataatggatggtcattaataataattcctgccgcatgtgtagatgtatgtcttggtaaaccttctaactttttacaaatactgaaccagcgttcatgtcgatggtttcgatgtacaaactttttaaaatcgtcaatttgatatgcttcatcaagtgtaattcctaatttatgtgggattaaacttgaaatttcatttaatgtaacttcatcaaaccccataattcttccaacatctctagcaactgctcttgcaagcagatgaccgaaagtcacaattccagatacatgtagctcgccatatttttcttggacgtactgaatgaccctttctcggcgtgtatcttcaaagtcaatatcaatatcaggcattgttacacgttctgggtttaaaaaacgttcaaataatagattgaatttaataggatcaatcgttgtaattcccaataaataactgaccagtgagccagctgaagaaccacgaccaggacctaccatcacatcattcgttttcgcataatggattaaatcacttactattaagaaataatcttcaaaacccatattagtaataactttatactcatatttcaatcgctctaaatagacgtcataattaagttctaatttttttaattgtgtaactaagacacgccacaaatattttttagctgattcatcattaggtgtctcatattgaggaagtagagattgatgatattttaattctgcattacacttttgagctataacatcaacctgcgttaaatattcttggttaatatctaattgattaacttccttttcagttaaaaaatgtgcaccaaaatcttcttgatcatgaattaagtctaattttgtattgtctctaatagctgctaatgcagaaatcgtatcggcatcttgacgtgtttggtaacaaacatcttgaatccaaacatgttttctaccttgaatcgaaatactaaggtggtccatatatgtgtcattatgggtttcaaacacttgtacaatatcacgatgttgatcaccgacttttttaaaaatgataatcatattgttagaaaatcgttttaataattcaaacgacacatgttctaatgcattcatttttatttccgatgatagttgatacaaatcttttaatccatcattatttttagctagaacaactgtttcgactgtatttaatccatttgtcacatatattgtcataccaaaaatcggtttaatgttatttgctatacatgcatcataaaatttaggaaagccatacaatgcattggtgtcagttatggcaagtgcatcaacattttcagacacagcaagtcttacggcatcttctatttttaagcttgaatttaacaaatcataagccgtatgaatatttaaatatgccaccatgattgaatggctcctttctattagttaagttttgtgcgtaaagctgtagcaagttgctcaaattcatcccagctgtccactgaaactcctgacgcattcggatgaccaccgccaccaaaatcttgcgcaatatcattaataatcaattgccctttagagcgtaagcgacatcttatttcactaccctcatcaactgcaaacacccatattttcaaacctttgatgtcagcaattgtattaacaaactgagatgcttcatttggctgaataccgaattgctccaatacatcttcagttattttaacttggcagaatccatcatccataagttcgaaatgttgtaaaacataaccttgaaacggcaacatttttggatccttctccatcattttatttaaaagcgcattatgatcaatatcatgcccaattaactttccagcaatttccatagtatgttctgaggtattgttaaaaaggaatcgcccagtatcaccgacgataccaagatataaaacgctcgcgatatctttattaacaattgcttcatcattaaaatgtgagattaaatcgtaaatgatttcacttgtagatgacgcgttcgtattaactaaattaatatcaccatactgatcaactgcaggatgatgatctattttaataagtttacgacctgtactataacgttcatcgtcaattcgtggagcattggcagtatcacatacaattacaagcgcatcttgatatgttttatcatcaatgttatctaactctccaataaaacttaatgatgattccgcttcacccactgcaaatacttgcttttgcggaaatttctgctgaatatagtattttaaaccaagttgtgaaccatatgcatcaggatctggtctaacatgtctgtgtataataattgtatcgttgtcttcgatacatttcataatttcattcaaagtactaatcattttcatactcccttttttagaaaagttgcttaatttaagcattagtctatatcaaaatatctaaattataaaaattgttactaccatattaaactatttgcccgttttaattatttagatatatatattttcatactatttagttcaggggccccaacacagagaaattggacccccaatttctacaaacaatgcaagttggggtggggccccaacgtttgtgcgaaatctatcttatgcctattttctctgctaagttcctatacttcgtcaaacatttggcatatcacgagagcgctcgctactttgtcgttttgactatgcatgttcacttctattttggcgaagtttcttccgacgtctagtatgccaaagcgcactgttatatgtgattcaataggtactgttttaatatacacgatatttaagttctctatcatgacattaccttttttaaatttacgcatttcatattgtattgtttcttctataatacttacaaatgccgctttacttactgttccgtaatgattgattaaaagtggtgaaacttctactgtaattccatcttgattcattgttatatatttggcgatttgatcgttaattgtttcacccatctgaggctgtcttcctaaaagttgcatagactttaaaacatcttgtctattaatcacacccactgtctttttattactcgaaacgacaggaatcaattcaataccttcccaaatcatcatatgcgcacaacttgctactgtactcatagcatttacataaataggatttcgcgtcatcactttatctatttcgtcgtcgtcctttgtattaatcatctctcgacttgttacaatacctactaatttataagactcattgactaccggaaatcttgtatggccagttcgattcgccatacgcttataatctgctattttcatcgtatcaaacagcacagataaatcatctaatggcgtcattatatcttgaactattaagatatcttttcgtattttctgattaaaaagtgctttgttgataatatttgcaactagaaatgtatcataacttgatgatagaacaggtaaatcatgttcattcgcaaaattaataactttattagatggcttaaatccaccagtaattaatatagccgtacctctttttaaagcttcaatctgcacatcttcacgatttccgacaatcaataatgtctttggaccaatatactttaaaatatctttgagttccattgctccaattgcaaatttagataccatcttagtgatacctttgttgccacctaacacttggccatcaataatattgacaatttcattaaaagttaaatgttcaatttcattacgattacgtttttcgattcgaaccgtaccaacacgatctatcgttgcgaccatgcccattttatcagcatctttaattgcacgatatgctgtcccttcagatacgtttaaaaatttagcgattttacgcaccgaaattttagagcctatagataacgattcaatataatctaaaatttgttcatgttttgtcattctttacctcttcttttcgaacagtattaactacattataactttattttggataaaaagcattgaagtgaaatgaaataatgatcgtttcacctattttattttttgaaaatatacaacaaacacaaagatcacaaaatctttaattttaaatggaaaaatccattattatttattagaatgtaagtgaggagggatgtactaatgtataaaaatatattacttggtgtagacactcagttaaaaaatgaaaaagcactaaaagaagtgtctaaattagctggcgaaggtacagtcgtaacagttttaaacgcaatcagcgaacaagatgctcaagcatcaattaaagcaggtgttcatttaaacaaacttactgaagaacgaagcaagcgattggaaaaaacacgcaaagctttagaatattatggtattgattatgaccaaataattgttcgtggtaatgcaaaagaagaactattaaaacatgctaatagcggtaaatacgaaattgttgttttaagtaaccgtaaagcagaagacaaaaagaaatttgtacttggaagtgtcagccacaaagtagcaaaacgtgcgactatccctgtattaatcgttaaataaaatttttatccagaatcacaaataatctttcaatcatgatgcagtctcaaacgactgagtaaacacaagaaatgattatgactgtggttctggattttttatatcgtagtaaatttataatcaatgtctaattgtatagaactaaaattacgagagtaggtcagaaatgataaagaaccactgatgtcccccgtccacgtcgtaactgaatcagtagaatataaaaacacccactaaaaaaatgcagacgataacttccacatagattagcgaggtgttttttagtgtaaaatctatattctatttaaaactgaacagattcacctggttttaaaatttgcacgtcccctacattaacagcatctttaaattgttgtggatcttgttcgattaatgggaatgtatcataatgaatcggtacagaaatttttggtttaataaattcattaatagcataacttgcatcatcaatacccatcgtaaaattatctccaattggtacaaaacatacatcaactggatgacgtttcgcaataagtgacatatcactaaacagacctgtatcaccagtatgataaattgtttttccttcaacttcaaacacgatacccattggcatacctaaataaactggaataccattttcatgtgtaaaacttgaactatgaaatgcttgaacaaatttaacgcttccgaaatcaaagtttgctttaccaccaatattcataccatgaacattttcaacaccgtgatatgaagaaagatagtcagccatttctgcacttccaattactgttgctcctgttttctttgctagttccacaacatcaccaaaatgatcaaaatgaccgtgcgttaaaacgatatagtctacctgcactgtttcaatattcaaatcacacttagggttatttgaaataaacggatctacgataacctttttgttgttcccttctaaataaatcgttgattgaccttgaaatgataacttcatttgagcatcctcctatcaattgctatataaatttagtacccttttgccacttaattataacaaattctcaaattttaaaaattgaaaatctagttaatgtattagctcgattttgaaatctaataataattggcataaaatggaagtaatattatgttgaggagtgtttataaaatgacaaaaatatcaaaaataatagacgaactgaacaatcaacaagctgatgcagcatggattacaacaccgttgaatgtatattattttactggataccgtagcgaaccccatgaaagattatttgcattattgattaagaaagatggtaaacaagtactattttgtccaaaaatggaagtcgaagaagtcaaagcatcacctttcacaggtgaaatcgttggatatttagacactgaaaaccctttctcactttatcctcaaacaatcaataaattactaattgaaagcgagcacttaacagtagcacgccaaaaacaattaacctctggtttcaatgtcaattcattcggagatgttgatttaacaatcaaacaattgagaaatattaaatccgaagatgaaattagcaaaatacgtaaagctgctgagttagcagataagtgtatcgaaataggtgtttcttatttaaaagaaggtgtgactgaacgtgaagtagtcaaccatattgagcaaactatcaaacaatatggcgtcaatgaaatgagttttgatacgatggttttatttggagatcatgccgcatcacctcatggcacaccaggaaatcgcagattaaaaagcaatgaatatgtactatttgatttaggtgtaatttatgagcattattgtagcgatatgacacgtaccattaaatttggtgaacctagcaaagaagcacaagaaatttataatattgtattagaagcagaaacatctgcaatccaagcaattaaacctggaatacctttaaaagatatcgatcatatcgctagaaatattatttcagaaaaaggttatggtgaatatttccctcatcgcttaggtcatggcctaggattacaagaacatgaatatcaagatgtttcaagtactaattctaatttgttagaagctggcatggttattacaatcgaaccaggtatttatgtaccaggtgttgcaggtgtaagaattgaagatgacatacttgtcactaatgaaggatatgaagtattaacacattacgaaaaataaggagtgggataaaaatgaaaagcttgttacaagcgcattctcattcagtcaaacactgccaatataacattgtagcgcctaggacataaatttttgtccaagtctaaatgcaatatgtaacaaacaagctagaaacacatatgcaggtatgttcatcagtaacatgtaatgaatcaaatcaatatcattcatgttcgatgatttcttcgcattgtttctagctttaatttatcattatttaattttaataaccaaggagatgataacgtcattctttagtacgctgtaatccattcccttttcatcaaattcaaattataattgtaatgcttcttctacagatttatattccatttcaaatgcctctgcaacgcctttattggttacgtgacctttgtaagtatttaaacctaatgataatggttgatttgatttaaatgcttctctataccctttattagctagcatgagcgcataaggtagcgtagcattatttaaagctaacgtcgaagtacgcggtactgcacctggcatatttgcaactgcataatgaaccacaccatgcttaatatatgtaggatcatcatgtgtcgtaattttatcagttgtttcaaaaataccgccttgatcaatagcaatgtcaataataactgacccatttttcatttgtttaatcatgtcttctgttacaagtcttggcgctttagcacctggaattaaaactgcacctattactaaatcactttgtttaacatacaactcaatattcaacggatttgacataattgtatgtacacgtccaccgaataaatcatctaattgttgtaaacgctttggattaacatctaaaatcgtaacatctgcacctagtcctagtgcaattttagctgcatttgttcctgcttgaccaccaccgataatagttactttacccttaggtactcctgggacaccacctagtagaattcccataccaccattaagtttttgtaggaactctgcgccaacttgagctgacattcttcctgctacctcactcattggtgataacaatggtaaagatcggtctggtaactgcacagtctcatatgcaatactaattacttttctatctatcaaagcttgtgttaatttttcttcatttgctaaatgaagataagtgaataatacaagcccttctttaaaatatggatattcagattcaagtggttctttaactttaataaccatatccacatcccaaacttttgcttgttcagcaacaatctcagcacctgcttctttgtaatctacatcttcaaagaatgatcctgaacccgcatttgtttccactaaaacagtatgcccactttctactaaagcgtgcacaccacttggtgataaaccaacacgattttcattatttttaatctcccttggtataccaattttcataccatccacctccataatcatcttaacgcgaacattttgaaagcgcaatcaaaaatccacaaaattgtaaaggttattacactgacttttccgaaaattgtggtaaaatataattaagaaagaacaaggaggcacttactatgattacttacaaaaatattttaatcgcagttgacggttcacatgaagcggaatgggcatttaacagagcagttggtgttgctaaacgtaacgatgcgaagttaacaattgtgaatgtaattgattcaagaacgtattcttcttatgaagtttatgatgctcaatttactgaaaaatctaagcattttgcagaagaattattaaatggttataaagaagtagctactaacgctggtgttaaagatgtagaaacgcgtctagagtttggctctcctaaatctatcattcctaaaaagcttgcacatgaaattaatgcagacttgattatgagtggtacatcaggcttaaatgccgtggaaagatttattgttggttctgtatcagaatctatcgttcgtcatgcgccatgtgacgtgttagttgttcgtactgaagagttaccagcagacttccaaccacaagttgcaacaactcaattacgtgaaaaatatcaaaattaaatatagatgatcattagataactacttgatcattatgaaccaagtgcaactttctgcacttggttttttattgtttataaataaaactcatttaataatgttttcataatcttcttcgactacttaattctttaagatattcgtgaaaagagacattacactagttaattttcaaacaatacaaaaagcgtctacctcctacatataattgtagcggagatagacgcttaatatttatttaaaaattattttaaaccaccgaatgtcataacatcacgggcaatcatactttcttcatctgttggaataacgacaactttaactggtgaatgaggatagttaataaatccttctttaccacgtagtaagttttcatttttcttaggatcccagtaaacacccataaattctaagccttcaagaactttcgcacgaatttctactgagttttcaccgatacctgctgtaaatacgataacatcaacaccatgcattctcgcagcatatgatccaatatatttgtgaattttagaagcaaatacatctaaagccatttgtgaacgtgctttacctgattcagcttcttctgataagtcacgtaaatcactagatgtacctgataatcctaataaacctgattctttgtttaagatttccaatacttgttcagcagttttacctgttttttccataataaatggaattaaagcagggtcaatattaccagaacgagtacccattgttacaccagcaagtggtgtgaagcccattgatgtatcaatagatttaccgccatcgatagctgcaattgatgctccattaccaatgtgacatgaaataatacgtaaatcttcaattggcttatctaacatttctgccgctctttgtgatacaaatttatggcttgtaccatggaaaccatacttacgaatgccataatctttataataatgatatggcaagctatatagatatgctttttcaggcattgtttgatggaatgctgtatcaaaaattgccacatgagggatatttggtaataatttacggaaagcacgaatacccatcaagttagctgggttgtgaagcggtgctaattcgcttaattcttcaatttccttttcaacctcatcagtaatagctactgattcagggaatttttcaccaccatgtacaacacggtgacctgttccatcgatatcgttaatatcattaataatattgtgcgctttaaaagcatccaacatgatatcaactgcctcaacgtgatccttgatatcttgtactgatttaactttttccccgttgacttcgattgtaaaaattgaatccttcaatccgattctttctattaaaccttttgttactaattcctcttcaggcattctaattaattgaaattttaatgatgaactaccagcattgatagccaagattaattttgacataagtaatgatcctccatcgtttgctttttatactatttcatttctcattttatcattcatacagttttatgactatactattacagattattttttaggacgatttgtgtccatccactgatttaactctgtcataaatccttgaaattgtgaaggatttttgaaatcaggaatatttgccaataatacttcaactggctttgtttcacccgattttttcttttgtaaaattaatatagattttcgcgctttttcatttttaaataaagttggtggtaaatttaaaaatgcttgcatctctgtctctgttgcaatatatttttcaagctgttttacatgttcacctgtaaaaatattacttggtaccactagaaaggcatatccagcatcttttaatgcatttattgcttgttctattaataaataatgtgaataactatgtccttcttcaaaacctagcttaaactccttacttctttcatcaattggataatagcctactggaaaatcaccaataacgatatctgcttcttctaatggtagtggcatgatggcatcttgaggatacacatcgaaaggaatttctaagaagtttgctaaatgtacactaacacgtgataaaactggatcaacttcaattaaatgatgcataaccgcaatttcaggtaacacttcttttacagtagcacttaaatgaccggcaccacttgcaatatcaacaatatgtaattcttcttggttgttcataaaacgctcaactaaaaatcctagtatcaatccaattgaatctggtgtaatttgatgatttgcttgtatcttttcttcctgcattaaacttaaatatgcaaattggaatgctttacgtcgatcttgtaacgtcgattgttctaacaatcctctttcattggtatatacttgttccattgctagcccaagattttcaataaaactttggccattttcattatttaatgttttagctttttcatctaatgtatgaaacaagcgttccataattgtttgttgttctgccatattcgtccctctccaataaaaagtgcccataggtcttagcaatcatagaaaacaattctattttaatgctgttgacaacgatggacacgatgtatacattttaagatttatctctttaatgattaaatatttttgtatgcagctaaagcagcatcaaaatctgggaaatcagtaccttcactaacgatttctttataaacaactttattatctgcatctaatacaaatactgcacgagctaataagcgaagttcttccataacaacgccatagttttcaccaaatgataagtcacggtggtcacttaatgtaatgacattgtctaaacctgctgaagcgcaccatcttttttgtgcgaatggtaagtctgctgaaattgtaagcacaatcccctcttctttagaagcttcagagttgaatttgcgagtctgctgatcacaaacacctgtatcaattgatggtaccacactaattaatttctttttaccagcataatctgctaatgttacttgatttaagtcattatctaacactgtaaaatcaggtgcaaaatcaccttcattaatttgttgaccttttaagtggattggtccacctttgaatgttatttcagtcatatacttgacctcctgcattttaaaattctaactacatcatacgacaatttatggtttgattacaattttcatgctttaatcaaaagcaaatttaattttatacaaattgttgaatataatcaaaagcattttttaaaattaaaatagcagtaataataataaataatacttttacatagccaacaccttgtttgatagcaaaatgtgccccagtatatgacccagcaatcatgcttgtagccattattaaacctattacataatctacttgtcctaataccataaataatacaagcgcacctatattagaagcaaagttcaaaactttagcatttcctgctgcacttaaaaaatcaaaaccaaagactaacaatacaaaaagcataaatgaacctgttcccccacctacaaatccatcataaaagccgattaatataaaaagtgctgcaaatagtatggctttcttaaatgtaaattgagtaaacgtacgtgtattgccccaatcttttttaagtaatgtgaatataaacaccgacgaaagtgcaataatgattaaaggtttcaatatttgtgacggaaccatcgttgcaatatatgcgccacatgcagatgccaaaaatacaaaaccaaataatttggcaacaacatataagtccactttaccggaccttataaactttatcgtactagttaaagaaccaaatgaacttgccaatttatttgtacctaaagccacagatggtggtagaccgattgctaataatgctggcgtagaaattaaaccaccccccccacaaccgaatctataaacgccgcgataaaaccaaataaaattatgattataatcatcgttaagttcaaatccatagtttaacatccccttatgtttaaatttactctaggattttatttataaaaagtcatttattaattggtttgtttgctgttctttaatagttttataatcactagttatttcaagtgtttcaatattttcaacagcacgattaatcatctcttcaaaatcaaagacactttcatattggactaccttatcaaagtttggttcggttactggatttttaggggtgaaaattgtacaacaatcttcaaatggttgaatagatgtttcaaatgtaccgatttctttcgatttaataataatttcttctttatcgtaagttaataaaggacgtaatacaggagtagaagttacattattaattgcatacatgctatgaagtgtttgactggctacctgccctaggttttcaccatttacaatagctaaagcccctatttgatgtactaatttatcagcaacacgcatcatcatacgtctcgttgaagtcattgtatatcttggatgtacaactttatttacctgtttttgcaattctgtaaatggtacaatatgcaatttaattggtccaacacgttcagctaaaatacgtgtcaattcaataactttttcttttgcttgatcacttgtaaatggtggactatggaaatgaatcgcttcaattgttacgccacgtctcatcacttccatcccagcaactggtgagtctataccgcctgaaagcattagtaacgtcttaccaccagtaccaactggtaatccacctgaacccggaacaacttcttcatacatataaattgcatctaatctaacttccactcgaatttcatgatctggacgtttgacattcactgaaatattgtcgaagtgcttcaatactgcaccacccaattcacgctgtaattcatacgtatccattgggaaatttttatcggcacgcttaacatcaattttaaatgtgctgttttcttcaaattgctgcgcaaatttaattgccgctgcactcattgcatctattgttttttctacttttaatactggactaatagatttaataccgaaaatttttgataatcgatatgttatttcatttatatctgcatggtcttcaagttcaatatacatacgatctcgtttgcctttaacgacaaacccatcaagtccttttaatgacttatttacattatttcttaattgatttacaaatttttttctatttgaaccctttaatgttaactccccgtatctaacaagcaagtgatcatacttcattattttagcaactccttaatttcctcataaatgatgataaatatttctttaaaccttgctatatcttctttagttgtagtagccccaaatgataatcttatactaccttcaatagatttgtctgataatcccattgcagccaatacttcatttaatttattacgtttagatgaacaagcactcgtcgtagatatcataatgtcatattttgaaaaagcattaactaatacttcaccttttacgccaggaaaactaatatttaaaacgaatggtgaacctgaagttgaagaattaatataaactccatgatatttatttaaaaattgacggacgtcattatttaactcagtaacaaatgcattcaatgcttcaaagttttcattagctatcttcatcgctttaaccattgcaatatcatttggcaaattaactgttccacttctaacaccatattcttgaccaccaccatggacagttggttcaacattttgaatgtgatttacaagtaagacgccttggccttttaaaccattaaacttgtgtccacttaaactaatactatctatgttattgagatccattgaaattttgccgaatgcttgaactgcatctacatgaaaatgtgccttaggataattttttataactttagccatttgtggaataggctgtatttgtccagttacattatttacatacatacatgttactaaaccgactttgtctgacattaattctttgaagtgttctaagttaatactgccatctttctttacatcaacatatttaactttaaatccttcgtgtgcttccaaatatcttacaacctctaatacggacggatgctctaacacggatgtaattatttccttcgctgtatcaaatttacgataggcaataccttttaaagcaagattattggattcagttgcaccactagtgaatacaacatcataatttgtttttgaattaatcattgcattaatttgggcttttgcttgttgtagtaattgatttgcctgcaaaccagctttatgcggactattcggattataatacattgattgatttacttttaaataagtatctaacacttcttcaaatgctttcgtcgttgccgcattatctagatatatcaaaataaacacttctctttcattaatcatcaatcgttaaaattgttttactcaagcattatactattatccgacaaaaaataaaggttatagcgcaaaataatcttatttctacttattaaataagaattagactatttcactctatttaaacagctgtgtgattatgcttttttcactacttatattaattaaaacaacacatttgattacgtttatctttaaacaattgctatttatatttattgtccctttcatttatccatataaaaaagaagctagacaacgtatcgttggctaacttcaattattaaactcatcagtccaatttgacagagtgctcatattatttaagtataactacatactagtttctattgcttaataacttcttcttcaatatgtttagtaacacctggctcaacactttcaagagcttgctctgcaatttcaatcgcacgcttatagcgattatttttaaataatcgttcagcttcatttaagctcttatcaacattgctatagtccttacgatatctatttccatattgaattaatttctctgcataaacagcattaacaagaacatcatttgcttcatcttcaaatgtattcatttgaatcacaattttagacactttatcttttaactgtttaacgtgtattggacgttcactaaattgttcgttaacatcacgaacttcatgatcaatttcatttttcatgatgataaacctttcaggaacgcttgttaagttagaagcaagtaatcgacgatacacttcttctttcttcgattgtactcgtagcagattgtcttctgcttctgcttcatcttcacgcaattgaatcagatgattttgtagcttttcttgtttgtcattaataactgtgacatgatcttctaaatattgtaaattatcctgaacctcgctatatcgcacagcagatttagacatttcttttaaaatatcatcatatacagaaattaaactttgaatttcattttcaaattgacgaacactttgagcatcagattcatttatatagtagttttcacgtacatattcaatttctgtttgcaatgtataattcatgtctttagctttgaataagttatccgtaatgatatcttttgtttcttcgacatcatttttagctttaacttcatgttcaattaaatcatacatgtcatctaacttatcattgatattagctagtttatcattagcttcttctaattctaagcggctaattaatggttcaacgaaactaagctctgtttttaagctttgtaatgtactgtctacttttacgtgatccagatcatacccttcaactttaagatcacggcaaccatattttaaatcttggaattgaccaggtaattctttttgagtttctctaattaattctggtatttcttccatataagatcttagctgtttcatttgttcattcaaggcagctatatggttgtgcgcttgtacataattaccatcagcttttagtacttcatattgctctaaccttggctcaaacttttcaatttcagtttcaagtagacttgctgcctcaccaaattgatgacgatttgctaaaacatcacgtttcatttcacgataatcaaccttacatttgtcatataattcatcattatctttgtataacgcaataatttcatttacatcttctaattgttgctgatagctttgttcgtaactatccatcaactcatttgcatcatcaatttcactttgagatgcgttgaaactaaatttatctaataaagcctcagcattatggattttttcttccacaggagctagatacttatttgtactttctacgttgtcctttttcattgcatcgtatttcgtttttgtttcaccttttaaattcaacttagataattgtgcaaggttttgatcaaaaggtaacgtctcaatttcatttttacgttcgattgctttttcaataatttgtcgtttatttgaacgtaaatagaataatacacctacagcaatcaatataatcacaattattgccaaaatgatatataacaccatatgcttctcctcctaatttatcattactattataacgtaattttgcttaaggataaattataaaatgaatttattgccataatattttcgaaattctatactattataaaatctatgaaaataagaggttttaaatatgacaacaattaacccaacaaactacacattattaaagaaacaagcagcaagccttattgaagatgaacatcatatgattgctattttaagtaatatgtctgccttattaaatgataatctagatcaaattaattgggtcggcttttacttattggaacaaaatgaacttatacttggacctttccaaggacaccccgcttgtgtccacattccaattggaaaaggtgtatgtggtacagccgtttcagaacgtcgtacacaaattgtagctgatgttcatcaattcgaaggacatatcgcttgtgatgctaatagtaagtctgagattgtcgttccaattttcaaagatgataaaattatcggcgtcttagatatcgatgcccctataacggatcgatttgatgacaatgacaaagaacatcttgaagcaattgttaaaattattgaaaagcaactcgcataaaaggacatcagcattttcaataaagtgttgacagttagcaggaaaatgttacaataatctttgtgtgaattaacgaaagtagcagttgtatattattgagcgctatgttgttcccaatgcggacgtgtcacgtaactgtcgctataaggtgaagacacataaaacaatatatcttagtaagcatgcaacactcttttttgtttattcataacaacaaaaaagaattaaaggaggagtcttattatggctcgattcagaggttcaaactggaaaaaatctcgtcgtttaggtatctctttaagcggtactggtaaagaattagaaaaacgtccttacgcaccaggacaacatggtccaaaccaacgtaaaaaattatcagaatatggtttacaattacgtgaaaaacaaaaattacgttacttatatggaatgactgaaagacaattccgtaacacatttgacatcgctggtaaaaaattcggtgtacacggtgaaaacttcatgatcttattagcaagtcgtttagacgctgttgtttattcattaggtttagctcgtactcgtcgtcaagcacgtcaattagttaaccacggtcatatcttagtagatggtaaacgtgttgatattccatcttattctgttaaacctggtcaaacaatttcagttcgtgaaaaatctcaaaaattaaacatcatcgttgaatcagttgaaatcaacaatttcgtacctgagtacttaaactttgatgctgacagcttaactggtactttcgtacgtttaccagaacgtagcgaattacctgctgaaattaacgaacaattaatcgttgagtactactcaagataatacgttcaatacaaacacccacaattgtgggtgttttttttattaatttaaaaatgatagattcaaaattatatggagctaccctattttacaatcaacttagaatttacaagtcttatttgtttaattatctttagtatttcatcattagtttttaaaattatcaattgcgatatacgaatcctcatccctctatcaaattaccattcatcgtctcacttaataaataatttcggattatctgtaattaatccatctacacccatttgtcttaatttttctccagttttcaatttattaactgtgtatggcataacctgtaattgatgatgatgtgctttatcaacaaattttctggtcactaatgcataattaggattaacataactagcaatttgagcaattcttgaaaagtttggctttttataccaataattacgtttactacaaagcacacctaattcatatatactgcccaatgtgtttaacttttcgatgcattcgatatcaaaagattgtataactacttgtgtcgcatcgactttcttttcttccaaaaatgccagcaatttacattctatttctggatataaattcggacttttcaattcaatcaatagctttttatcatactttaagcataatgaaagtacttcatctaacgtgggtattcgttctcccttaaaagcaacatctttataactaccaaaatcaaatgattttaattgcgataatgtgtaatcagaaatacgccccttaccatccgatgttctatcaattgtttcatcatgtatcacaacaaaatgttggtctttggtcaaatgaacatctatttctaacatagcaacattgagccccattacctctcgataaccgaccattgtattttcaggaaaatcactcggcaatccacggtgcgaaacaatttgtaattcatctttcagtttattcagagtcattgataagtcacctttctgttaaactttgataaactattctaaaattaaactatcacaattatattggaggttaaagcaattgcatcaacatgactttaaagtccaaacttcttggcaaggtggtcgtaacaatgtcggaaacgttcaaggcgacatactttcagagaatatttctatacctgcttctttaggtggtgttggtataggaacaaatcccgatgaaatgttagtatcagccgcttcatcatgttatatcatctcattagcagctactcttgaacgtgcaaagttcacagatatttcaattgaacaacaatcgattggaacagcttgtttaaataacggaaaattcagtatgtcaaaaattgtgcaccatcctcaaattcaaattccaagtgatcaaatagcacaattagaaaagcgattaccaaaattgataacaattgcagataataattgcatgatttcaaatgctgtaagaaataatgtggacataaaaatctatcccagcattcaggccaaataaaatcgttaagtgataacgtttgttcgacaatatagcgttatcacttttttaggcttttaaattttcagaaaatttgctaaaatagtgaaatcttatttataggaggcatataaatgtattatcatcaaccgttgttattaacacctggcccaacccctgtacctgatgccattatgagagaaattcaagcacctatggttggtcatcgttctaaagattttgaagacatcgcacaacaagcatttcaaggtctaaagccaatatttgggagtcaaaatgatgtacttattttaacatctagcggtacaagcgtcttagaagctagtatgttgaacattgtaaaccctgaagatcacttcgttgtcattgtttcaggtgcctttggtaaccgatttaaacaaattgcacaaacttattacaaaaatgtgcacatttatgacgtaacatggggagaagctgtagatgttaaagatttcatcaattatctttcaactttagatgttgaagttaaagcagtatttagtcaatattgcgaaacatctacgacagtgctacaccctattcacgagttaggaaatgccatcaatcaatttaatagtaatatttattttgtagttgacggcgtaagttgcattggtgctgttgatgttgacattaacaaagataaaattgatgtacttgtttctggtagtcaaaaagcaattatgttacctccaggattagcttttgtagcttatagccaccgtgcaaaagaacgtttcaaagaagtaactacgccaaaattttatctagacttaaataaatacatttcgtcacaagctgacaattctacaccgttcacaccaaatgtgtctttatttagaggtgtaaatgcatacgttgaaaccgtaaaagcagaaggtttcaatcacgtaatagcacgacactatgcaattagaaatgcattaagaagcgccttaaaagcattagatttaactttattagtcaatgataaagatgcatctccaacggttacagcattcaaacctaatacaaatgatgaagtgaaaataatcaaagatgaacttaaaaatcggtttaaaataacaattgctggtggtcaaggccatcttaaaggtcaaattttaagaattggtcatatggggaaaattagtcctttcgatattttatcggtagtatctgctttagaaattattttaactgaacaccgtaaagttaactatatcggtaaaggtatatcaaaatatatggaggttattcatgaagcaatttaatgtactcgttgcagatcccatatcaaaagatggtatcaaagcattattagatcacgaacaatttaatgtagatattcaaactggcttgtccgaagaagcattaatcaaaattataccttcataccatgctttaatcgttcgtagtcaaactacggtcactgaaaatatcataaatgctgctgattctttaaaagtaatcgcacgcgccggtgttggtgtagataatattaatattgatgctgcaacattaaaaggtattttagttattaatgccccagatggtaatacgatttcagctactgaacattcactggcaatgttattatcaatggctcgaaatattccgcaagcacaccaatcacttacaaataaagaatggaatcgaaatgcatttaaaggtactgagctttatcataaaacattaggtgtcattggtgctggtagaattggtttaggtgttgctaaacgtgcgcaaagtttcggaatgaaaatactagcttttgacccttacttaacggatgaaaaagcaaaatctttaagcattacgaaggcaacagttgatgagattgcccaacattctgatttcgttacattacatacaccactaacacctaaaacaaaaggcttaattaatgctgacttttttgccaaagcaaaacctagtttgcaaataatcaatgtggcacgtggtggtattattgatgaaaaggcgctaataaaagcattagacgaaggacaaattagtcgggcagctatcgatgtgtttgaacatgaacctgcaactgattcgcctcttgttgcacatgataaaattattgttacacctcatttgggtgcatcaacagtcgaagctcaagaaaaagtggcaatttctgtttcaaatgaaatcatcgaaattttaattgatggtactgtaacgcatgcagtgaatgcacctaaaatggacttaagcaatatagatgatactgtaaaatcattcatcaatttaagccaaacagttggtgaattagctattcaattaatgtacaatgcaccaagctctattaaaattacgtacggtggcgacttagcctctattgatagtagtttattaacacgtacaattattactcatattttaaaagatgatcttggtcctgaagtcaatattatcaatgctctaatgttgttaaatcaacaacaagtgacattaaatattgaaaataataaagcagagacaggttttagtaactacttagaggtagaactatcaaacgatagcgattccgttaaagttggcgcttctgtctttacaggtttcggtccaagaattgttagaattaataatttttctgtagacttaaagccaaatcaatatcaaattgtgtcatatcataatgatactccaggtatggtaggaaaaactggcgcattgttaggtaaatacaatatcaacattgcatctatgactttaggtagaactgaagcgggcggagatgcgctaatgattttatccgttgatcaacctgtttcaaacaatataattgatgaacttaaacaagttggtgaatacaatcaaattttcacaactgaattgacggtacagtcataaacaatttatgtaaattcaaaatgccaagaagacattggattacttccattgcttcttggcattttttcattattaatttcattgtaactcaatatgaaacctttggttcaatcattcacttcaagttatgctgtcaaacaacaatcaaattacaaattatctagtacacttctaagttcacctaaatgattaataacatagtcggcatgatgcgcttctaactcacctgcagcatccttaccttttaaacctgttaatgttccaataaacgttgcacctattttttgagcacttaataagtcagctaacgaatcgcctactataaatacgtcatctttatttacaatgttatcttgcttattgatataagattcatatttatcgcgattattaccatataaagctgcgatataactaaaaggattcggctttcctaatggtcgtgcttgcggatacatattctctgcttctaaaacatcacttgctgttgcaataaaatcagcctcaaaatatggtaacaatcctaaattttcaaatggcacaacagtctcagtataaggacgacctgttgcaatacctaattcgaaaccagcaccttttaaatcattcagaagtaccttaacttcatctactggtctcaaaataatttcttgataaatataacctgtcttaaaagtagttcgtgctattttcttttcaacatcttcatacaacttcgatcctaaataccattcttgataaacttcttgcgctaacgtccataatgcacccttcaaactaaataaagtagcatccgaaacatgtaactctgttgttgcaaactcttccaaagcagcataaatattatttttaccaacttttacattatccaaaaattgtaaaggtagttgttcatttaaattaaaacagtctgctaagtttgtgcttatattttgcaacttcaattcgacaggctcatcttgatacatgaatgcctcaatttcatcatgtgataactttttcaaaatatcaattaaatgaatactaaaaacgataaataacatatcccaatttgaattcagccctagcgattttaatttgtttaaaatcttatctttttgaaaaattcgattcctaatgtcttgtatatcgttatcagtcaaagtttcccaatctatatgtgaatgaagacctaaataacacttatccattaataattcatataccgttaatgcagagacatcgaaacaacgttcttcacttaaaaaaacgccatcaacatcaaataaaattttcttcacaatccccactccatttctgaaaattcagatataaatcattctactatttgactaaaaaaagcgcaaaccctattgaagttggatttgcgctttagctgtttaaattttataaatgtttttcaatttcatcagcaacctgctgtacgtgtgtaccgacaataacttgagttgaatgtttaccattaacagtaacaccaactgcaccggcgcttttaatcttctgttgatcaataatagatgtgtcttttaactctagacgcaaccttgttgcacaattagttaaattaacaatattctcttgaccacctaaaccttctaatatttgtatagcatgttgatgatatttactttgtttaatatcattttcaccaggagcaatattatcttttacaactgttggatcaactaattcattttcacctctaccaatcgtattcaagttaaatacttggattactacacggaaaatcacatagtataagatgaaaaatacaacaccttgaacaagcaacatcaatggatgatttgataccggattaattagtgataacacataatctatcaaacctgcactaaatgaaaatccagctgtccaatggaatgtagctgcgataaataaagataatcctgttaataacgcatgaacaacatataagattggcgcaacaaacataaatgcaaactcaatcggctctgtaacaccaacgaaaaatgctgcaactgaactcgctaggaaccaaccgtaaacttgttttttctgagtcgttttagctgtatgatacattgctaacgcagccgctggaataccgaacatcatgattgggaagaatcccgcttgatagcgtcctgtaataccttttatagcatctttgccactttggaatttaccaatatcattaataccaatcgtatcaaaccagaacacactattcagtgcatgatgtaatcctgtaggaattaatagtctgttagcaacaccatatatgaaagcaccaaacgatcctaaaccaactatagattcaccaaattttacaatccatgaataaagtagtggccataagaataacaatatgacaactaaaaatgtacagtaaaatgcagtcataattggaactagacgtttaccactaaaaaatgataatgctaatggtaattctgtttcactaaacttattgtatgcataagctgctattaaacctattacaataccaacaaagacattgccattattcatcttttcaaaagctgaatttatttccgaagctttcattcctaataaaggcgctaatttcattggtgataatacaactgtaactaaaaaatatcctaacgtagctgcaagcgcgactgcaccatcatttttctttgccattcctatagctacaccaattgcaaataaaatacctaattgctctaaaatcgtagtacctaccgtagtaaagaacattgcgattttcggcgtcgcatgaagtgcatttaacgtattaccaattccggcaataattgctgcagccggtaaaatggcaactggtaacattaacgaacgccctaaattttggaaaaatttatacattgaatgtcatccttcttaaaataaggtagaaatataaagattactaatgtaactagaataactacttcgatactccgttatagtcacctaggcttactaaccagctatatttctacctcaagttattttataaactttttacaatttcatgcaattcttgttgtaactttgctgttcgtgtttcaatctcttttgtaatataatcgatacgctcgtttcgttttaaatctttaggtaaatcgttaatatcgattggtttaccaatatttatgtatgcttgtcctgttaaaagaccgtgaatcttagtaggaccaacataagcaacaggtaatattggtgacttacttaacattgcaattgttgaagcaccacgtttcaaaggtgcaccttcttgcgatgtgcgagaacctgttgggaagataccaactgtcttattatctttcaacaaattgattgggcgttttaaagtactaggtcctggattttcacgatctacaggaaatgcatttaaagacgttaaaaatttaccaatccatttatttttgaataattcttttttagccatataatgaatttgattaggatataatgccatacctagcataatgacttcgttataactttcatgcgtacaagttacgacatatttactatccttaggaatattatctttaccgattacgtataatgattttgacattttaactaaaatgaaattcaaaatcttactaatcactgaatacattgtgccacctacttaacttatttgtttataacaactagattttatcactatatttttactagaacaagatagtctgaaaatacatctaaagttgtatagtgtattactagcaataattataaaaaaaagacataattaaagcatatataaatcatataatggaggttaagtatgtcagattttaatcatacagatcattctacaacaaaccatagccaaacacctagatacagaagacctaaatttccatggtttaaaacagtcatcgttgcattgattgctggaattattggtgcacttctagtacttggtataggcaaagtattaaatagtacaattttaaataaagatggttcaactgttcagacaacaaataataaaggtggcaatcaattagacggtcaaagcaagaaattcggtaccgttcatgaaatgataaaatctgtctcccctacaattgttggagttattaacatgcaaaaagcatcaagtgtagacgacttattaaaaggtaaatcatctaaaccatctgaagctggagtaggttcaggtgttatctatcaaataaacaacaattcagcttatatcgttacaaacaatcatgttattgatggcgcaaatgaaattagagtccaattacataataaaaaacaagttaaagcgaaattagttggtaaagatgcagtaactgatattgctgtacttaaaattgaaaatacaaaaggtattaaagcgattcaatttgccaactcttcaaaagtacaaactggcgatagcgtattcgcaatgggtaacccattaggattacaatttgctaactctgtaacatctggtatcatttcagcaagcgaacgtacgattgacgctgagacaactggtggcaatacaaaagttagcgttcttcaaacagatgctgctattaacccaggtaactcaggtggcgcattagtagatattaatggtaatttagttggtattaactcaatgaaaattgctgcgacacaagttgaaggtatcgggtttgctattccaagtaatgaagttaaagtaacaattgaacaacttgtaaaacatggtaaaattgaccgcccttcgattggtattggtttaattaatttgaaagatattcctgaagaagagcgcgagcaacttcatactgatagagaagacggtatttatgtcgccaaagctgatagtgatattgatcttaaaaaaggtgatattattacagaaattgatggcaagaaaattaaagatgatgttgatttaagaagctatttatatgaaaataaaaaacctggtgaatcagtcactgttaccgttatccgtgatggtaaaacaaaagaagttaaagtgaaattaaaacaacaaaaagaacaaccaaaacgtcaaagccgatcagaacgtcaatcacctggccaaggcgatagagatttctttagataatttacagacagaaaagtacattaagagcctactcattacattcttaggaatgaatatgagtaggctctaatttatttagctatgcaattatatttattgatagttaaccatgaagtattttttcttaccgcgacgaataatcgtaaattcgccatcaattttatcttctggtgctaaagcataattaacatcttgttgtctctcaccattaatataaatcgcaccattgttaacatcttcacgtgcttgtcgtttagaaggagaaatgcctgtttcaataaggacttcaacgatatttgttgtgtcatttgataatgtcacttgaggcacatctttaaatccatcttttaattctttcgctgataatgattttaaatcaccactaaataatgcttgtgaaatacggattgcatcatttaatgcatcttcaccatgaataaatttagttacttcttcagctaatgttttttgagcttcacgtaaatgcggtgcttcatttttagattgttctaagcgatcaatttcttcttttcctaagaaagtaaagtattttaagaatttaattacatcttcgtctgattgattaatccagaattgataaaattcataaggacttgttttttcagcatctaaccaaacagcacctgactcagacttaccaaatttcttaccatctgatttagttacaagcggaatagttaaaccgtatgcgtctgtttgaccatacatacgacgcattaattcaataccacttgtgatattaccccattgatctgatccacctacttgaatcttacaattcaattctctattcaaatgaccgaaatcaatagcttgtaaaatcgtgtatgtgaattctgtatatgaaataccatgttctaaacgactttggattgaatctttacctaacatgtaattaacgccgacgtgtttaccatagtcacgtaaaaaactaattaatgagatttgtcctaaccagtctctattattaacaagcactgcaccatggtctgttccaaattcaaaaatattgtgcatttgcttacaaataccttcgatatttttatctacttgttcttctgtttgtagcacacgttcttctgatttacctgatggatcaccaatcatacctgtaccaccgccaattaaaacgataggacgatgtccatgttcttgaaaacgtcttaatgttaagaatggtagtaagtgaccaatatgtaaactatctgccgttggatcggcaccgcagtataacgtcacttgttctttatttaataaatcttcaataccttgttcatcagtttgttgataaataagacctctccattttaaatcttcaattaatacattcgtcattattatttcctcctatttataattatttattgaatacttgttaaaatactttaaagttttttgaacgtaaaaaaaacccttacaacaaatatgtaagggcgcgattgcacgttaccaccaaacttaaacataatcataagataatgttcactctattaatgatacgttcattaataaacgtaggacatgttagttataaaggtgtattcatattattaaaaacactagttcacagcgaccactagctctctgatgatttcaaataatattacttgtccttttatcctattctttatgcattttccctaattataattaacgttaaaataaaagtcaaattgcttaaatatggtatactatacgtaatttaggaggttaaagatgacgaatcaagacaacaatcatcaattgaatcatcgtatatatcattttgaaaagatatataaagctatcaaacatgtcattgtttttatatttatgattttcattgccatcgttgctatcgctgtgattgcgatgtctttatattttcatcatttaactaaaacgtccgactcattatcagatgatgctttaataaaaaaagttcgacaaatacctggcgatgaattattagatcataataacaaaaatttattatatgagtataaccattctcaaaactcactcattataggccctaaaacatcaagtccaaatgtcattaaagcattaacgtcatctgaagacactttattttataaacatgatggcatcttaccaaaggcgattttaagagcaatgatacaagatatttttaatactgatcaaagttcaggtggtagcacaattacacaacaacttgttaaaaatcaagttcttaccaacgaaaaaacatatagtagaaaagcaaatgaacttcgcctagcaattagattagaacacctactctcaaaagatgaaattatatatacatatttaaatatagttcccttcggtagagattataatggcgctaatatttccggaattgcatccgcttcatatagtttgtttggtattccaccaaaagatttatcaattgcacaatctgcataccttatcggtttgttgcaaagcccatatggctatacaccctacgaaaaagatggaacattaaaatcggataaagatttgaaatatagtatccaaagacaacattatgtattaaagcgtatgttaatcgaagatcaaatcactgaaaaagaatacaacgacgcattaaaatatgatattaaatcacatttgttaaatcgaaaaaagcgttaattgatgctcactttttaaagtaaccacaacaatgaatccaaatattaaaaacagcagtaagattattttcaattagaaaatttctcactgctgttctttttatttactctaaaggaaagccattaaaccaatcaatagtttataaattaattgctttcacattgtctacaaagttaatcatacatatgctatatttagttaattatttagattcttttctgaatttaggaatgaataaagctaacatacctaataacgcatataagccccaccatgattggcttgaagttgtttctccagtttttggtagcattttagattgactaagtttgttttctttcgatggtgtgccggctttttcttttgttttcactgttttatctacagttttatgaatatcactcggcagatgttcagttatttttttgtcagtaactttgtctgtattattataattttgtttcactacgtcaagctttgctgcttttccagtatgattatttttatcggcaatatgattcagctgtatgactttgtctttatttttattagagtctttatcagtatcgacattcgatgacataccaacgctattatcggcatctttatccacatttctatcagtatctttggcaatttgagtatccatttcttttaaatcatacttatcgaagtgattgttattcatcatatttgttgatgaatgatcaatatttagatgcgcatctttgtcaacactactatcagtatctttaaccatgtcagactctggttctatcacatctgctttatcagacgcatctttaggatttgttgcagtgctgctattttcagctacatctgtatcagcaaccttatcttcttgtcctgtttgtacatttagcggttcactcgtgttattttgtgatgtatcatcatcttttgtattgatatcctgatttataattctgacatgatattgaccttcataaccaatgtttgccacaacgactttaacaatcgcattgtaaactgctttgtcaggtatatatgggaaaatcagcgttctagaattatttttaggatctttagaaacagtagtgacacgtttaccttctacaattaaatctttccagtaactgtcatcctttgttttcatcactacatatttttgaccatttaaagttgctgtatagaatggatgttcaacaaagccgtccataactgactcactattttcttcactttcaaaaacaacaaaatgcgcttcttgtaaatctgttaattgatcatttgtaggtgtaacattttcaaattccgtcactgctgatttaacttgatcagctaactctactctagtttgatctaatttctttttatattccgccttatatttttctggcaatttctcttgtaatttttctaattcataaacttgtctttctaacgttttagctttgtgatacggagctaataatttttgtaaattgtatgtttcttcatccacatagtcgtctgggttattagtaataggctgtgcaaagaccattagcgtataatcatagtcttcatggatgttctcaccatattcaatagatgacacaattttaacttctctcgtaccattagatactgggaaacgaatataggcataatctttatcagaatcatatgatactaattcgactggtaactttttgtcaccttcataaacttcaaatttcttccatgttgaagctgtctttaaacctaattcaattattggtcctgtttttgtaaaaatgacagttgctggttcaacagtactagcataatgatagaactgtctttcacctttatcatttttcatttgaaaatcaattggtcgccaattatcagctgtatgttctttatcgatgatagccgggtttttaattgcatcttgtagtgattcatctgctggtggatactgttgattaacatccgactgattacttgactcattcgttttatcgttagtattaccattagaatttgtttcatgagctggttggcttgacgcttgatctgcattcgttgacgattttggttgtgcaggttgactcatattggtcgttgcctgcggttgattattagcattgttgatcgttgatgtattttgattagatgtattcgtgtttgtttgattacttgcgactgaacttgattgatcattcgttactactgcatcatttgtatctgattttacaagtgaaggatcgttataaataggtttagcaaatactaatttagtataatcataatttgtttcttctccatcatcaatttgagtcgaagaaacaattttcaattcttgtgtgccatctgaaactgggaatcgaatataggcatggtcttctggtacaggactatatgatacaagtctcactggcaatttttgattgttttcatagacttcaaactttttccatgttgaagcagtattgatgtctaattcaacttctgctttctttttagtgtaatacacatctgctggatctttgatgctgaaaaagtgatagtactgcgtttcattgtttttatctaataattggaaattgacttgttctcttggacctatatcatgttctttattttctaatgcaggatctttaattgcatctttaagtgattcatccgctgcaggatagtttttcgcagtgtttgctggttgcgtagcaggttgtgtttgatttgtatcctttggtggctgagttgtagttgcattattattttgattttccgagattttatctgaagtatttgtattttctgctgcttgcgcttgatgttgagaagtaattaaaaatagtgtactgacaatgaccgatgcaacgcctagagttgattttctaatagaatagaaagaccttaattttgggtgatgtttgttcatgttgttaacaactcctataagattatatttaattgataataattatcaatatcaattattagtgttaattgtagcgcatcccaattaaatattgcaacctattttattaactttttttaatatgtaatattcattgcatcgctttcctattcttcaagcccactttttatcttcatatacattaattaaccaccttcaaacattgtcgttagattcgccaaattgaatctatttttagcacagcaaaaaaccgaactgctgaaataatgcatctccaacagtccggtctattaaactatttacttatctttattaaacaattgacatgatttattagaataacccaattgcatgaccatcatcagtaacatccatgtttaatgctgctggttttttaggtaaaccaggcatagtcatgattgcacctgtcaacgctacgataaatcctgcacctgttttcgcttctaattcacgaattgtaatttcaaatcctgatggtgcacctaacaacgtttgatcatctgagaatgaatattgtgttttcgccatacatactgggtaattatcccaaccattttctttaaattgttttaattgtttttgcgctttactgctaaacgttacttttgaaccgccatagatttcagtcacaatcttttcaatcttttgctctaatggtaattctaattcatataaaggtttaaatgaattaggttgatcaatgacttctaatacttcatttgctaagtcaacgccacctttaccacctttttcccaaacttcagttaaggcaattcgtacattattttctttagcccaagattttacatattctacttctgcatcagtatcatgtataaatgcattaattgcaacaaccggttctacaccgaattttttaatattattaacatgacgctctaaattaacaattcctgcttttactgcttctacattttcttcttttaaattatctttcgctacaccaccatgcatttttaacgcacgaattgtcgcaacaacaacgacagctgccggatcaaatcctgcttcacgcgctttaatatccatgaatttttcagcgcctaagtctgaaccaaatccagcttccgttacaacgatatcagctaaatcacgtgctgtttcagttgctaaaattgagttacaaccgtgtgcgatattcgcaaatggtccaccatgaactaatgcaggtgtcccttcaattgattgtactaagtttggtttaattgcatcttttaaaatcattgcaagtgcaccttccacttttaaatctgcaactgtaactggcttgcgatctctagtgtaaccaatagtaatacgactaattttatcttttaagtctttaatacttctacttaaacataaaatcgccataatttcagacgctactgtaatattaaagccatcttcacgtggtacaccatttgtaggcccacctaacccaacgtttacatgtctaagtgcacgatcattcatatctaatacacgtttccattcaatacgtctttgatcgattcctaattcattaccttggtgaatatgattatcgataaacgcagacaatgcattatttgcagttgtaatcgcatggaaatctccgttgaaatgtaagttgatatcttccataggtaagacttgcgcataaccaccaccagtcgcaccacctttgataccaaatgttggtcctaaagcaggctctcttaatgcaaccataacgtttttatttaactcatggaatgcatcagctaaaccaactgtaaccgttgatttaccttcaccagctggtgttgggctcatcgcagttactaaaacaactttccctttgttttctcttggcgttattttattaatgtcgattttagctttgtaatgaccataaggttctaatgcatcctctgaaatacctactgatgcagcaatatccttaattggttgtagtgttgattgattcgcaatatctaaatctgataaatgagtcaacttttttcgcccctttttgtttaatttatgcattttaaatatgtaagttgtagctaagaaatttttacttacattcatataataacgaactgttaaaaacttgtcgactaaatcgggttagcgctttcatttttgcaataaattcacttattaaagttttgcattatacaacttttagcgcttgatactattgataactatatttttctattatttaaaataatcatcttccaaagatcatattaaaaataaaaagcaatataaagatatgccattattgttatgtcatcattttcaaatgctttctacgaaatgatatgacacaagttaacagctctttatattgcttatcataaagtaaactaatatttaaatattaacatgaaatatgttgtctccctttattcttcgaaagaaatcttcaataacattcatgtcattattccattgtacttaaatccccagcatctaaatttaattcccaagcttttaatacacgtctcataattttacctgaccgtgttttaggtaatttatctttaaattcgatttcacgtggtgctgcatgtgccgacaaaccttctttaacaaataaacgaatttcttcttttaattcgtctgttggttcatatccttttctcaatgcaacaaacgccttaattatttcaccgcgaaccggatcaggtttaccaataattcccgcttcggcaactgcttcgtgttcaaccaatttagactcaacctcaaatggtccaactcgttcaccagctgtcataattacatcatcaacacgtccttggaaccagaagtaaccatcttcatctttatatgccgaatcaccagatacataccagtctccaataaaatatgatttatatttttctggattcttccagatacgatacatcattgatggccagcctttttttatagcaaggttgcccattcgatttggtggtaattcattacctgcatcatcgataattgcagcttgaataccaggtaatggtttgcccattgagccaagcttgacgtccatcgttggatagttaacaatcatatgtccacctgtttctgtcatccaccaagtatctaacaccgttaaaccgtatacttttttcgcccatttcataacttcaggatttaaaggctcacctactgatagaatcgaacgtaacgatgacaagtcatatttctcaacaatatcgtcaccagcactcattaacattcttaaagctgttggtgccgtataccaaatcgtcactttaaaatcttcaatcatactataccactgttctggtgaaaagcgaccaccagctatacaatttgtagcgccatttaaccatggtgcaaaaataccataagatgttcctgtaacccaacctggatctgctgtacaccaataaacatcatcttcttgtaaatctaatacatattttccagaaatatagtgcactaacattgcttgttgaacatgcaatacacctttaggttgcccagtagaacctgatgtataatgtaaaatcaaaccatcatccgactttaaccattcaatgtcaaattcatcgctagcagtttccatcaaactaatgaagtctatgtaattgtcttctacatcctcatctacgacaacaatttttttcaagttcggtaatttatctacaggtactcgaggtaacaatgccttattagtaattaacactttagcttcactgttctctaatctatccgcaactgccttttccataaatgcttcaaataacggcccaacaattgcaccaatttttaaaacacctaacaacgcaaaatatagttcaggtgtacgcgacataaatataaatactctgtcacctttggcaacttctgcatgttcagacaaaacattcgctgctttattagataaccgttgcatatctttataagtatacgattcttttctgtactcatctttgtaatttaacgctattttatcccctaatccttgatctacatggcgatctatacattcatatgccatgttcatttttccagtttcactccaagaaaatgcttgttctacgtctttccaatcaaaagtattatatatttcttcataatctttaaggttatgtttaccttgcgctcctttataaacttcgactttcatttgaaactccccctttgttatgtgaaaacgctttctttctcaatattatacataacatttctaattattcaaaatttttacttttatcctttttctagtattaattattgtaaattttctatataatgaatttaatacaatcacgacgtcgattgaggagttgaaaatatgaatcatttaaagacgtatcaatccgaagattattacattcatgacaagcaatttgttattgaaggtcctttaacatacgaagatttgaaagcgcttactttcgatgcgcatttaaccgcatttagagatgctgaagatcagtatgaagctttgttagaaattacaacattaccagaaggtagaatttatgttgctcgccaagatcaactcattgtgggttatgtcactttccactatcctgatgaaattgagcgctggtctacaggtaaccttccatatttaatcgaattgggggcaattgaagtcagcatcaattttaggcaattacatcttgcagaaaagctaatacaacttagcctttctacaccagaattcgaggattatatcgttataactactgaatattactggcattgggatttaaaaaattcaaagttagatgtatttgactataaaaaattaatgcagcggttaatggcaactggtggacttgaaatattcgctacagatgatccagaaataacaagtcatccagctaattgtttaatggcaagaattggcaaaaatattacattagaacagcaacaagcgtttgatgatattcgttatatgaatcggtttttcttttaatttttggaatatcggagggattatatgcaacaacattcatcaaaaactgcatatgtttattcagataagttattacaatatcgatttcatgaccaacatcccttcaatcaaatgcgtttaaaattaacaacagagctacttttgaatgcaaatttattgtctccagaacaaatagtacaacctagaattgcaacagatgacgaattaatgttaattcataaatatgattacgtcgaagcaattaagcatgcttcacatggcattatcagtgaagatgaggctaagaaatatggattaaatgatgaagagaatggtcaatttaagcatatgcaccgccatagtgccacaattgttggaggcgctttaactttagcagatcttattatgtcaggcaaagtattaaatggttgtcacttaggtggtggattgcatcacgctcaacctggtcgagctagtggtttttgtatatacaatgatattgcaattaccgcacaatacttagctaaagaatacaatcaacgcgttttaatcatagataccgatgcacatcatggagatggtacacaatggagtttctatgccgataaccatgttactacttattctatccatgaaaccggaaaatttcttttcccaggctctggtcactatactgagcgcggtgaagatatcggctatggacacactgtaaatgtcccacttgaaccgtatacagaagatgcatcatttttggagtgttttaaattaacagttgagcctgtcgtaaagagttttaaacctgatattattctaagcgtaaatggtgtcgatatacattatcgtgatccactaactcatctaaattgtacgttacattcattatatgaaattccatattttgtaaaatatttagctgattcttatacgaatggaaaggtaattatgtttggtggcggaggctacaatatttggagagtcgtaccacgtgcatggagtcatgtattcttaagtttaattgatcaaccaattcaaagtggttatttaccgttagaatggattaataaatggaaacattattcatctgaattattacctaaaagatgggaagatcgtttaaatgattatacctatgtccctcgcacaaaagaaattagtgaaaaaaataaaaaattagctttacatatagcgagttggtacgaatctactcgtcaataagtaacataatctgcaacgattttaaaagataaataaaaggcattcttccaacacccatataattcgggtcgttagatgaatgcctaattttgtgaatttattttgtagttcctcggtattcaattctgtgaggtaaaactacatttggttcttctatcttttcatcattcatatattttgttaataagcgcatccctactgcaccgatatcatataatggttgaataacactagaaagttgtggtctaaccatctcaactaaacgtgtattattgaaactaataatttgtaattcctctggaactttaataccagcatccattgcactatgcataataccaatagcttcttcgtcactaatacataatatagcatctggaagattacctttcattttggcaaaagcttttacgccttctttataactttcagcaccagaacaattcaatgtatcacctaattgaagaccatttttatttaacacttcagttaaaccttctaaaacatcttcttgagcttttttagaatgttctccacctactaaagcaaatgatttagcgcctttttcaattaattctcccgtaatttctttcgcagcttcagtaaaatcaatattaactgatgctatatgtgcatccttaccatttgttcctgatactactacaggtacagatgattgatttatcaattctttcatttcttcagtaattgtaccaccaaggaaaataataccatcaacttgtttacttaataagttattaaaaatttctttttccttttcaggatcgttatctgaatttgaaataattgagtgatatttatacattgttgcaatatcttcaagtccacgagcaagttgtgaataatagatattagatatatctggaatgatcacacctactgttgttgtctttttactagctaaacctctagcaacagcatttggacgataattcaaacgcttaatgacttcgttaactttatttttagtttctgctttaacattttggttcccattaacaacacgcgacactgtggccatagagacacgcgcttctcttgctacatcatatatagtaactgtcataatttcctccttgtaaacgttttattcattataataacatgttttcatttcattttcatagtttaccatattttaatttacagtaacatatttttgtttggaaaaatttagcgaaaagcttgaaataaaaacaaccgctaaatgataacgaacgatatattttaattttatataaacttttttcatttttaattgtaatattttgagaaagccttttcaaatatcaattgcatttgttgaaaaatattcacatttcagtaacaaatgtgtgaatctattatattttacagataattcatagttataattttaattactgctatcagtcataatctttaataattgtgaaattgaacaagtgtcgaagtattataacaatcgttaagtgcagtatacctttatttctatacaaaaaataatagccaatctaaaagtaatatactcttagattggctactagtttaaaattgtcgattcaaagataatattctacttcatcatgacatattagttaagtagtctatagtctccttggaatattattttaactttttagcgttatataaatcagctaaaggctttaattcatcataaaatgcttggaattcatctaaatccatttgttgacccgcatcactaagtgcaacagatggatctggatgcacctcagccataacaccatcagcacctactgctaatgctgctttcgcagttggtaacatgatatctttacgacctgtactatgcgtaacatctaccatgactggtaagtgtgtaccttgttttaaaattggtactgctgaaatatctaaagtgttacgtgtcgccttttcataagttcggattccgcgttcacataaaataatgttttgattaccttgtgaagcaatgtattcagctgcataaacaaactcttcgattgtagcagataaaccacgttttaatagaataggctttttcgtacgcccagcttcttttaataactcaaagttttgcatattacgtgcaccaatttggaatacatctaaatattcatcggctacttcaaaatcattaggatttacaatttcactaactacatttaaatcgtatttatctttaatctgtttaagtattttaagtccttcaacacctaggccttggaagtcataaggcgatgtacgtggtttaaaagcaccgccacgaataaatttttcacctttagcatgtaagtttttagcaacagcttcaacttgttcaaatgattcaactgaacatggcccaaatacaaatgatttattgccgtctccaataatgcccccattatcaaatgttacaatcgtatcttcaggtttcaacttacgtgatacatataaatgtttttcattttcagatttttgtaaatctgtagaggctttgaaaatttctttaaataattgcttaatagtattatcgttgaatggtcctttgttactatcgattaagtcgttaagcatttctttttcacgttgtggatcatagatacgtgtaccttgttttaatttttcttccccaattttttgtgctagttcaccacgtttagataataagtctaaaatttgatgattcagtgatacaatctcacttctgtatgattctaatttattactcatccttactcacctctactaattatttcaagtatattccactttaaagcaataaaatataatgttaaaaaatattctaacaatatcatatgtatagttcaaccctaaattgacagaaaataatcaattttctaattatatgattcgagactgacacttcgattttctcagtcattattgaaaagttatattctatattgatatttattagcaaatgttaatcaattaaataagtgtcattattatagcttattttgagtcaacattactgcttttaagaaaaattttcgtttctatcttctattataaatctaaaattctcatacattcaacctaacgcttaataaaaattaacaacctttgtctttgtatattaatataaatctatagtgaacatcactcaccaacatatgcggctatatttgaattagtgaacgtcattgtaccttctaagattcattgtttatttgattatcgaatatttttccatcttcagcttaaaatgtgcaatatcactattgtaatctaacgatgttacaaacaacataaatacatggaatgattgcgttgcctttcaaaataaactgatgatatcaaaaaaggtaagcacctgaatgcctaccttttattttgaaattcaatttttaaaaatataatacatagcttactgctatgattgattattaaacgattttagtaatcttagtcattgaatgtacgtttctctattttacttttagctttctcaactttagcatttggcgtttttgatgcattggatgatttagcatttgttgtttttgaattcttattactagtttgattattcttttgagttgacttacttgaactactttgtttctttgcaccttgtgatgatttcttattatgttgctttttctgacctgaagttttatttgtagatgcttttgatgcatttcgtttatttgaaggtgttgtttttttagattgtttacctgatttcttgtcaacagctgtattattagttgttttttcatcagctttacgtgtaataacaccattttcaaatttagcttctttttgtttaacagtgtctttattatctgtattaactgtctctgtctctgatacatcgttctttttagtaactaattgaggaatttctttcaagtcatttttagcaactggtttttctgcaaataacgcttcagttaattgactctcttttgaacctggtgttaatttagcttgcttctgttttgcagcgtttgctaatctttcagcttgtgactctggttttgatacttctacctttgctgcacttgcatctttagttaatgtgtcactgtctttctctgcttgtgcttcttttttagcttcttgaacctcttgtgcctcttgtgatgtatcacttaaattatttgcacttgcttcttcttttatcgctgcttgttgtgctttcaatgccactgcttttggttcttcatttgatacagctgcacttttatctgtttctgcttgtgcttcttttttagcttcttgaatctcttgtgcctcttgtgacgtgtcacttaaattatttgcacttgcttcttcttttattgctgcttgttgtgcttttaatgccactgcttttgattcttcatttgatacttctgcacttttatccgtttctgtttgtgcttcttttttagcttcttgaatctcttgtgcttcttgtgatgtatcacttaaattatttgcacttgcttcttcttttatcgctgcttgttgtgcctttaatgccgcttgctcatttttagatttgtttaaaaatccttcaacacgttcttttgtataggcaaccgtttcttcaagttgcgtttttctttcttcaaacttttgcgacagttcttgttctttgacttttaaatcatctgctttttgataaactttatttttaaaatacaaacctagagctgatcctacaagggcacctgttataaaactaacaacaaaatctttacgattaggtaaggcttcattttggtaagtatgtttattttttaatgttcttttattattttgttgttgcgtcatatttatatcctcctataacaaatgcacttaaataagtaacaacctcatttaagtgcatttgtttaattattaattatttatctactcgagaagtatagctatgatttgcatcagttgctacattattagctttgtaatttgcacttccacgacggtagtgtctattttgccatttgtctgcaatttccattgcaacatttgaccattgaacaacttgtgagattttatcttcattttgagaaatattatgtgtaattgaatttgttacacgatctacagagctgtttaacgtttgtactgagtcaccgatacctttaacagcatctacaactgagtttaaacgatctactttaccttggatatcctcagttaaacggtttactttatgaagtaaatctgttgtttcacgagtaataccttgaacttgaccttctacaccgtcaagtgtttttgcaacataatctaagtttttcttaacagaatttaatacagctacgataccgatacataaaattaagaatgcaatcgcagcgataattccagcaattggtaaaatccaatccattaaaaacgcctcctaattaacatgtaataatgtcattaataataaatacccatactactctattataaacatattaaaacgcatttttcatgcctaatttatctaaatatgcattttgtaatttttgaatatcacctgcacccataaataaaacaacagcattatcaaattgttctaatacattaatagaatcttcattaattaacgatgcaccttcaattttatcaattaaatcttgtatcgttaatgcgccagtattttctctaattgatccaaaaatttcacataagaatacacgatctgctttacttaaactttctgcaaattcatttaaaaatgcttgtgttctagagaaagtgtgtggttgaaatactgcaacaacttctttatgtggatatttctttcgtgctgtttcaattgtagcactaatttctcttggatggtgtgcataatcatctacaataacttgatttgcaattgtagtttcattgaaacgacgtttaacaccaccaaacgtttctaatgcttctttaatatttgtaacatctagcttctctaaataactaatcgcaattacagctaatgcatttaaaactgtatggtcaccatattgtggagacaggaagtgatcataaaactcaccatccacatacacatcaaaagcagtacctttatccgtaatttgaatattttgagcataaatgtcatccgaatctttaaatccatagtaataaattggaacatctgcttcaattttacgtagatgttcatcatcaccccaagcaataataccttttttaacattatgtgccatttcttggaatgcatcaaaaacatcattaatatctttaaaataatcaggatgatcgaaatcaatatttgtcataattgcgtaatcaggtttataacttaaaaagtgacgtctatattcacatgcctcaaaagcgaaataatcactttcaggcaatcccatacctgtgccatcaccaattaaaaatgaagtctttttatcaccattcataacatgtgataataaacctgttgtagaagttttaccatgtgcaccagttacagctactgaagtatattgatcaataatctgtcctaaaaaatcattataacttacaacatctaatttcaattgatgtgcacgtactatttcttcatggctactcgcgaatgcattaccttgtataactaccatatcttcttttatgttattagcatcaaatggtaatatttttatccccttatttctaagagcaacttctgtaaatacgtagttctcaatatccgatccttgaacttcatgtcctaaatcatgcatgatttgtgctaatgaactcatgccagaacctttaattccgacaaaatgatagtgtgtcattatataaaactccttactcataattattctttatttaaatctgcttccgtaacataaacatcccttggttttgaaccattagcactcgaaacataaccgagttgctctaattgatcgataattcttgctgctctattatagccaatttggaaatgtctttggattaatgatgttgaaatatgtccttcattaaccataaatgcacaaacatcatcaaataattcatcttgtgattgtgtttgtgtttttttcaacaattctttttcttcaaatagatagtccggttctctttgttgtttgataaaatcaacaacatcatcaatttcgtcatcagaaacaaatgtaccttgaactctaatcggtttattcataccgctaccaagatataacatatcgccatatcctaacaagcgttctgctccaccactgtctaatatcgttctcgaatctacacttgatgataccataaatgcaattcttgttggtatgttggctttaattaaacctgtaattacattgacagatggtctttgcgtagctactaacatatgaataccacatgctctcgctttttgagcaattctagcaatagactgctcaacttcttgcggagccatcatcattaaatcagccaactcatcaattacaatgacaatttttggcattctttcatcatatggtgcttttttgttaaatgctgttatattacgtacatggtaatgtgcaaataacttataacgtcgttccatttcttctacggcccattttaaactctgtgtagctgctttgacatctgtaattaccggtgcaactaaatgtggcaaaccattataaggagctaattcaaccatttttggatcgataagtaataatcttaattcctcagggtgatttttatatagtaaagacatcaaaatactattgatacaaactgatttccctgatccagttgcacctgcaattagtgcgtgtggcgttttagcaatatccataagtaatggttcattattaattctataccccatcgcaactgttaatttagattcagcatttttaaaacttggagattcaataatagaacgtaagttgaccgtcgttggattttggttcggaacttcaataccaacacgactagttcctggaattggcgcttctatacgaatatctttcgctgccaatgccattttaatgtcatcttgtaatgccgtaattcttgaaactttaacacctttttcaactgataattcaaatcttgtaacacttggaccttcagttacatcttgtacttctgcaggtacattaaagtaaaataatgcgtcattcagttctttctttttatctgtaatccagtccacgtccggctcaataacttgtggttcttctagtaatgaaacacttggcaatttaatatttgggcctttacgaatcatcggcttagatgtttgtacagcttgatttgttgcaacatctgattggttcgtccgaggtctattttcattagctgtatcttcattttgatttgaaaatgatgactgtaaatctttttgttgatcatcattatcttgttgtccactagtattgtttggatgtgttgtttcttcgctttcttcagttatgtcgcttacttctgaaactgaagacgaagttgattgatcaacttgctcattttccaattgattatcatcttgactttcttcaaatatttccgtttgagttgaatcaacagaaggtttctgctctgaatattgttgtgcattttgataatcattttctgtttctgcatgaccaataagttgattgttctcaacattgtttgatgtcatattatttgttttatatgcatttgtatttgactcttgtgaatcagtgcttgatgatggtgtggcttgactcgcaggcattctttcactcacagcttgcttactttgtacaggctttaattcaggcacattgacttttgaatgctttttacgatccatcatacgctttttatcagatggcgtcatgacaacattaaatggtcttttacttaaagttgaaaccttttcagtctgtttctttggatttacgttttcaatagttttctcttcgacattttgttcactttcagctgcttcgttttgcacattttctgtaatttctgcgttattcttttctatttcattcatgcttgaatcttccacaacatgaccatcattcacatcattcgttttcaatgagttgacacttaagtttgtttggtcatcttttttatgacgcggtgctaattcaatttcattatcaaccgttttatcgatattattaacttgagattcagttactgcgtgctcttgcgttttaggagcgtctacatgcatttcagacgcgtttctattggtattatcttcgatatttgaagtagtatcctcatctgcttctgtatcatttaattcataaaattctgcatcatcgatttgacttcctgaatattcttctttattcgttgctccatcttcttctgaatcagcaattaatctggattgattttttagttcatctttatcatttacttcaacgttatgttgtagtgctgattgatgttgagacgttacattcgaaaccgtaacttcatcatctgacaattgttttgttgtcgatacttgattcaaactaacttcctcataattgtatggactttcatctacatgagtgtcattagtgtcttcattttgtattgacgcttgtttattttcatcatttgatacagtttcattctctatgccatttgtatgaagctgactagcatctgtactattatctgttaagtcactatcatcatttaatgaactatcaccaacatagcgttccgcttgtttagcatacatttcatcaattgcacgttgtattgcatcttgctcttcgtttttatgttcttcacgcttttgttgcaacgcttttttaaatcgacgcttttgaagcactttacgttctcgttcacgtctaatttcttcaacaatttgtgaagcataaatattttcaattttgatagtattatcaacttttgaataattaggcattgattttgttgttgatgatacattttcatcagatgatttagatgcagttccttgtatgacaacactatcattttgtttttcttgttctaattgtttattttgagacgtttgcgtcttagctacatatttatcatatttttgtttatctgactcaactttttctgaaggtttacttacagggatacgaccattttctaactttttaggtttcattgtgccaaaaatagctgacggtacctctgaagtcttgaaactttctttgtgataatctggagttgaatctttagcacgatgatttgtattattagaatacatattatgtgtttttgacttgtgcgtttccttctcaataccattaattgcagaaacatatgtacctggcttattcgtatggtaatgtgaatgatctttatattttatactttgctgtgatattttagaattcccacgttgttcactataattttgttcttcagttgtttgatttcttctacggcgatgtcgtttttgtgaacgagaatcgtggctttgtttgcgatagtctcgatggtattgttctttttcatctgaaatagtatctgcagattgttcaacattttcattttcataagctacgctcataggaaaacggaattttcccctcggacgactataaatatcattattttgaggcagtaatgagtcatgatcgttatctatattttgtgattcttgacgtctttttttctttctatgaatcaagtcatcatttgaatcattatcttcgccgaataatttatcaaaccagctcatattttcactaccttccttaattattcaaaaaatgcttgtccaatttcatagctgtcatttaataccataatacctttttcttcaggtgcattaggtaaattcaattctttcattgaacaaatcataccgcttgaggcaacaccacgtaattcagcatctttaattaccataccgctaggcatcactgcacctactttagcaacaacaactttctgtccagcttcaacgttaggcgcgccacatacaatttgtaatgtgtcatttccaacgtttacatttagtacacttaatttatctgcatcaggatgtttgtctttagtttcaacgtagccaactacaaatttcggtgataaatcagcatttaatttataatcaaaaccagcttctgaaatacgcttttggaatacatttacaagttcatcagttaatttaatatgacctttttcttcaattgttatatcttttgaaatttcaaaaatattataacctacaacattaccttcattagtaatttcaacaacattaccttttttattgtagtttaattcaccttcaactggttcaatttgtaaaaatgcgacatctcctacatatttaggattgtaaaataaattcattatgacaaaactccttatccaattatttctatttatctttattaaatttacgacgatttgcttctaaacgctgaatcacgtttggatctcttttttgtttattatttttacctaaaataaatatcggttcaagatgaccctgtttatatccaaaggataatgatgtaattggaactagacctttagtgaaaaattccattgttaaatgtgccatcacatcatatcctgttttattgcgtatatctgcaataattaacacatcttggtgtggcactgctacgagcatttcgccttgacattgtgcctcaatttcatttaaaaatgcagtatttagtatcctacttgcatcatacccgtcatttgagttaataaaataaaaaatattaccttttacttcatcagtcgtatatgaatttgacaattttctaacattaaacagagacatttctcttatttgttgttcagttaacttcaaatcctctaacatgctttcgtcaattagacgatatgatttccctaaatcgactgcataataaactgctgtttctgcagtatgctcatcatagataaaaggaacaccttgtttagtttttttatcaaagctagtcgctctaatgacaggcataatttgactagatgatatactctcaagggttttatctgccatttgtgcaatagcttcatcaacgtaataaacaatttcatctacaattttttcttttttatcttcatattttgcgactatagcgttaagtttaatcgtgatacctttgttattatctgttcgataaatacgcaaagtttcttcttcacgattaaatttaaaatcaacgtctaaatggcttaaacgttcctttaatttatctctcatttgaaaggtattcatatgtaacactcctaatttcgcaccttataatagtttacaataaatcaacacatagtaacagagaaaaacgagcattaccccgtttttctctagtctaaattacacgtattgagctaaaaatgcatctatctgttcaattgattttcgttcttttccaatataacttccaagcagttctccatttttatatactagaaaacttggaatccccataataccattttcaatacaaatatccataaatttatcacggtctactgatacgaagtcaaacataggatatctcgcttctaattccggtaaatctggttctatcactctacaatctggacaccagcctgcagtgaattcaaatactgtagcacctagttttaaagattcaaattgttgttctgattcaagttgtttcatttttatgtctccttaattaatgattatatataactatttagagataatagttgttattacccgattatttatattgtaatgtttctatttgattattatctaaattacaaatggcttctgaaagtaaagatctagctgcaaaatagtctcttatatcaaatactgagtctgtactatgaatatatcgtgcacatacaccaataactgcagtcggaataccaatattagctttatgaatttctccaccatctgttccacctggtgacatatagtattgatgttcaatgtcatgtgcttctactaactttaataaatagtctctaaatacaggctttaaaatcattgtaccgtcttttatgcgaattaacgtccctttaccaagttcaccagataatggttggtttcctttaacgtcattggcaggtgaacaatcaactacaaatgcaacgtctgggtctatcatctctgcagatgctttcgcacctcgtaatccaacctcttcttgaacatttgcgccaacatacaagtctacatctaattctatatcttttaataattctagtatttcaattgccaagacacaaccataacgattatcccatgctttagcactatatcgatgttcagataactgtgtgaatggcgtgtgaggtacaattgtatctcctatatctattccgcgctcacgcacctcatcttcattttgagcacctatatctaatgttaaatctttaatttccggtgcaccttcactaccagtacgaaaatgtttaggtatattagaaacaacaccgataattttatcgccatttctatttttaattactaagcgttgtccttgccaaatatcatttgcaacaccacctaaatttgtgaattgaatcattccatttttagtgatatttgtaatcataaatccgatttcatccatatgtgctgcaatcattacacgttttgcatttggatttttagattttttcacaccaaaaaatccacccatacgattttcaataaattcatctacgtacggcgccatttgctgagtcatataattttttacttcttcttcaaaacctggtgccccatgaagctcagttaaagtttgaattcgttgtaatgttacttttttatttatgttcataaaagttctcactccttataagttattatatcatcttcaatatggtaaactaatgatatgaatttgaaatcaagggagcataaatgatgactaaactgaaatatataattccaacaataattgcagtagccattgtaattatttctaccatttcaatcatccaatatattaatcgtaaacgctataatcccgttaaagtacttaatgaagtaaaatcatattttatgaatgtcaaaggctcatatatcgtttatgaaccattcgttcatcctgaaactgataaataccgtttagtttatcaaggtggaattacaactattaaaaatggtcaaaatattcattatgatttttatgcagatgcatatactggtgaagtcattaacattgtagagcgttaatacgaattttatccatatttgatttggatcgtaaaacttaaaaatgagccacaccctaattagtaagattggatgtggctcaattttttatttttgaaaatttgtttagtaatacatctttattttagttattatcaactaatgtttcacgtaaaatatatgcatctatgttttcaccatcatcgctgtattttacagcaaagtagttttcatcatgataaaacaagaaccaatattgttgctgaataaaatatggtatcatgcgttctttttcacgaatcgattgcataggataatcatcatatgccgttacccatagaggatttttatgtgcagtagttgggaatatatcacccatatgaactgctttatctccttgactttcaatcgtaataatcgtgtggccaaagctatgacctccactatgttgcatcttgatacccggaaccggttcaaaatgtttttcgaataaaatcaacttgttactataatcgcctttattcttatcccagtaagttgatttacttcttatattaggtgcaataaactcatgccactcatcttgttgcacaacatgaatcgcattttcaaaaattgcatgtcccgcttgatcagtcaaaccggcagcatgatcaaaatgcatatgtgtcattagcacataatcaatatcctttggcgttaaattataatttgccaaatcagcaattatatgactttcttcatctactccaaaattacgtaattgcttttcagataatttaccattaccaatacccgcatctataatcaaattatattgagccgtttgaatcaaaattggatgtgtcggtaaattgatttgatttcgttcatttgcattgtattgctttgaccacaacggcttcggaacaacaccaaacattgcaccgccatccatttttgtattgccaccatttagataatgaatagatatatccccgatcttcataacatcacctattctttctgtattcgttattacaattagcatgtgtttattacatcatatcactattcataaatgcgaacaaaaacgaaacgtcccacactaatacacttctaactacttataaagattaatgcaatcatattatatgtaaatgcatcataaccatcggcctgtaattttaaattaataattaaaatttacaagtaaaatgcaagctttattcttttaaatcaaaggtatttagtataacattgttcataggcgcattatctcctttagttatttgtttagtcacttttaattatagagataattgcgctttttttatattcaaaatcaaaaaatcggacagatgaaaagttaaaaactttttccatcagtccgatttattatagaacctttatctatagaaccattatagtacgaaaaaacacttatgattgtatgtgtacataccctcataagtgctctatttttgtgaatggaatttcgcttccatacgataaatacgtgaccctttatccgaaaatttcttttcatattctgttaaaatattactgccatcgtcttcttgatgtaaatttagatttatttttgtaaaatacattccaaattgagacatactttctaaactgtaggcaaatagtcctctgttatcagttttaaaatgtaaatctccttcatcatttaagatttgttgatacaacgctaaaaacgtatgatacgttaaacgtcgttttgcatgacgattttttggccatggatctgaaaagttcaaataaatacgcgaaacttcgccgtctttaaaatattcatttaattcaatggcgtcattacaaataatctttaaatttgttaaacccatctctttaactttatccaatactttataaacgatacttttctcacgttccattgaaatatagttaatatgaggattttgagcagctaatgttgtaataaactgccccatacccgaaccaatttcaatgtgtatcggttgcgttttatcaaaccattcagtcattttccctgcatgttgaccgtccatgtcaaccaattcaggatgatcttttaaataatcttcagcccatggtttgtatcgaactctcatattttattctcctcttaaataaacatgttactattcataacttcatttaggaatttaagccaagtgttcatatccttatatcttttttgctcttcataccattgaacaagacctatagattgaattaccgtataccatttcatacgtttatttaaattcaagctctcttgaacaccatatgtttcaagccattcagaccattgttgttgtggaacatagttgtaaagcagcattccgatatcaattgccgggtctgcaatcattgcaccttcccaatcaactaaaaatagttcatctcgatcggataataaccaattattatgattcacatcaccatgtacaacagtgaaaaaacgcgaatctaaactcggtatatgctcttctaaataggttaatgattttctcacaatatgatgtgttaaaacttctcttgataaagaggcattaattttattaagcataatctcaggagtaataggttccatttccatacgctttaacatacttaataaaggtctagaattgtgtatcttctttaataaatgtgcaactcttgtttgcttcatttcgtttgaagatagttcacgcccatttttccaatgttgtgctgtaacaacctcgcctgtttctatgcgtttcgtccatactaatttgggcacaataccttctgctgataatgccgcaataaatggatttgaatttcgttttaaaaacaacttttgtccatcttgttcagccatatatgcttcaccagatgcaccacctgctgaatcaagtgtccaccctaattgataaaactgctccaactcgtccacctcactttcaattagaaaatggctctagaaataggtttttcaagagccatatattctaatttataacaccatactggtacaaatattatgtccagataattattgtaaatcctcaaccaatgcctacattacacgactaaattcaaatcgtaatgtctgtcattgacaccatacattctatagtcacttacttgacatataatgttaccgtgtctaaaactacatgtttttgaatctctgtaggcgataaactctagttttcaaaataattgctatcccattttcatggttagcataaatttatgaactgtaacatttacgtacttagtaaaatatgatgcacatcatatttgtaactcatagaaaattttataatttttatcattatatttcaactgaaaatgagaaaaaaaatggcactttttactaatatgtgttttctaaacaacacttttaagcttcgttttaaattataacataattcacttacgaaagttgataaatttaagtaatttaatctaaaaatatgatgaaagaattttaaatactgtgtgactctatatacttttcaaatccttcttgtagttgacgtgtaattgggccaactttaccatcattaactggttcaccatctaatttaataacaggtgtaacctcagctgaagtacttgaaacaataacttcatctgcgtttttcaagaaatctacagtaaacgtttcttctttaaatgggatgttatagtcttcggcaatttttttaattacaattcgtgtaataccattaagaatatagttgttaatcggatgtgtataaatcacaccgtctttaattgcataagcattacttgaagatccttcagttacagtttcacctcgatgttgaattgcttcaactgcattatatttcacagcatattcttttgctaatacatttcctaataagttcaagcttttaatgtcgcaacgtaaccatcggatatcttcaacggtaacaccattcacaccattttctaaatgatcataaggacgatcataactctttgtataagcaacaattgctggttctacttcaggtgtcgggaagctatgattcctttcagctacaccacgcgttgcttgaatataaattgccccagtttcaatttgattcatatcaactaatttacgagatagttcaattaattcttctacagaataatttaaatctaaaccaatctcattggcactacgtaaaaatctttcataatgttctgttactgtaaataacttaccattatatactcgaatgtattcataaataccatcgccaaatacgtatcctctgtcgttgtatgaaacctttgcttcacttggacttacaaactcaccatttaaaaaaattttttccatatattattcctccacgcataatgaataaattgcttctaagtaaatactagttgcgttaaataactgttttttagtgatatattcatttttctgatgcattaaatcttcagaatcactaaacattgcgccaaatgctacacccttgtctaagtttctcgcataagtaccgccacctatagtataaggttcagtcatatcatttgtttgatttctatatgcagtaactaacttttgtacaaaaggatcatttttatcaacataatgtggtggttggactttacctaatttcacttcaaagccatattgttgaatctcatttgcaaaacgatccatagctttttcaaattcaaatccttctgggtagcgtaagttgataccgaaaagacctgcgttttcattatcatatgtaataacaccaatgttagttgtcacgtcacccatgacatctgtatggaatttcattcccatcttttcaccaaaatctgaattaaataagtagcgattactaaatgctacaaacgcttgtgcattattatcaagatttaatgatgctaagaattttagtaagtaaagacccgcattcacaccgatagatggatccataccatgaaccgctttaccttcaactgttaaaactagaatgccactatcaacagtactatcaccttgtaaatgattttgttctaaaaagtactcaaagtcttgaataacatctgtcatattttctttaacaagcactcttgcttctgcatgatcaggcaccatgtagtaacgttcaccagatttaaaagttattaattcataatcaggttcatcttgatcttcagcaagcttattttgaactaagtcaaatgttgtaatgcctttttcaccatgaatacacggaaattctgcatctggtgcaaaacctaatgttggcatttcttctgttttaaaatagcgatccgtacatttccaatcagattcttcatccgtaccaataatcatatgaatacgtttcttccaatccacattcatatcttctaatatcttaattgcataataagcagcaattgttggacctttgtcatcaagtgtacctctagctatgatagcatcttctgttacaaccggctcgaacggattactatcccatccatcaccagcaggaacaacgtcaacatgacataagatacctaatacgtcacttcctttacctgcctcaattcttcctgcaatatgatccacatcatgtgttgtaaatccatctctatgtgcaatttcatacatgtagtctaatgccttacgaggacctggaccaactggtgcgtcttctgatgcttttgcatcatctctcacactttcaattgctaataatccttttaagtcattaatgatttgatcttcgtattgttgaactttttctttccacattcgaaatcgacttccttttttctataagttaaattctattttacatgaaatgatataaaaactacaataagatgtcagaaaataataaaaaggaacaaaacgatgctatcgatatgacacaaatcataaatagctgctttgttccttttctgtattaatttaatttaatatgccagttcaataccaacttattaattgtatgccttattctttatcagataatgcatttttattcttttttaaatcttcttcagtgacgatacgtaaattattatttggtgctgcgccaccttcatcatcaaatttacctttttcaatactttcgtcagtcttattgtcatattcggtaaattttgatttttcttcttcgaaaaatgcttttggattattttttaatctattagcatattctttcggatttgtttttacttctttaattgtttcattagcaattgttcctaattgcgtcgctttatccttagcattatctttatagctttgaggatcttgtttatatttattatattctgctttcagcttgtcacgactatctttacgtgtaacaagtacagctgctacagcgccacctatacctaaaatcgctttaaataaattaccttttgccatatcaatcgtctcccttttatttataatttaatttgtcaaaatcattttcagttaataaacgatattctcctgaatctagattgctgtccaattctaaatcagcaattttgatacgtcttaaatgtaatacctcattttgaatgctatgaaacattcgtttaacttgatgatattttccttcataaattgttacgtgtgacgtttgattatcaatataagttaaaattgcaggcttaaccttgccatcagacagtgttacaccctctttaaaagcttgaatgtcgtcttcagtgataggatttgctgaaataacttcatattttttagaaacatgtttgtttggactcattaattcatgattaaaatcaccatcattcgttatcaataaaagcccttctgtatctttatcaagacgaccaaccggaaaaatatttagatgttggtattcaggtattaaatcaataacggtttttgaatgatgatcttcagttgctgatatataaccttttggcttatttaacataatatagacattttcaatgtattctattaattctccacgaactgttatcttatcgttttctggttctatatgtgtttttggtgatttaattacttgttcgttgacatttacaaggccttttttaagtaactgtttgacctcattacgtgtaccaacgcccatatttgctaaaaatttatctattctcatcgtaaaaacctaactctacgtcttaatttttcaggaatttcacctaagaattcgtccgcaagacgcgttttaattgtgattgtaccgtaaattagaatacctactgtaacacctaaaataataatgattaagtaaccaagtttagtaggttctaagaatagatttgcaaggaagaatactaattctacacctagcatcataataaatgaatacaagaatatttttgcaaaatgaatccaactatagctgaatttaaacttcgcatattttttaagaatatagaaattacatccaattgcaaataataatgcgatactagtacttaaaattgcaccaggtgtatggaataacataattaatggatagtttaacgctaacttgataactacagaagctaaaataacataaactgttaatttctgtttatctataccttgtaacattgatgccgttacacttaatagtgaaattagtattgctacaggcgcataatagaataataagcgactaccatcatggttagggtcatgacctaaaacaattggatcgtaaccatagaaaactgtgaataatggttgtgccaaggccataattccaatactagctggaacagttataaacattaatacaccaatagatgttctaatttgatgatgcatttcatgtaagcgaccttctgcaaatgtttttgtaatataaggaattaaactcactgcaaaaccagcacttaatgatgtcggaatcattacaattttattagttgacatatttagcatattaaagaatatatcttgtaactgtgaaggtataccaactaaagataaagcaccgttatgtgtaaattgatctactaagttaaataatggataattcaaacttacaataacgaacggtatactataagcaataatttctttatacatcttgccatatgacacatctatatctgtgtaatcagattcgaccatacgatcaatattatgcttacgctttctccagtaataccagagtgtgaatataccaataatcgcaccaactgctgctgcaaaagtagcaataccattggctaataaaatagagccatcaaagacatttagtactaaataacttccgattaatatgaaaatcacgcgtgcaatttgctcagttacttctgacactgctgttggccccatagatttataaccttggaatatccctctccatgtcgctaatacaggaataaagataacaaccatactaatgattcttataatccaagtaatatcatcgactgaccaaccgtttttatcatgaatgtttctagctaatgttaattcagaaatataaggtgctaagaaatacagtaccaagaaacctaaaacaccggtaatactcattacaataaaactcgatttataaaatttctgacttactttatatgccccaatagcattatatttcgcaacatatttcgaagctgctaatggtacacctgctgtcgcaactgcaattgcaatattatatggtgcataagcgtatgtgaacggcgccatattttcttgtccaccaattaaatagttgaatggaatgataaaaagtacgcccaataccttggtaattaatatactaatggtaattaaaaaggttccacgcaccatttctttactttcactcattacgaatctccctatctcatgtttattaaagttttgtaaactaaaagctgtttctctgtaaaatcatttttcattattatgaatatatcacaaaactttatttcattgtcgtatattcaatgaattatcataacaaaattatcaacacattgtcattgaatactagattttgattagaatattacgaaatttcatataaacattatactactatttgagatgaacatcgcataacagtagaaaaatcattcttatcatacacatacatcttcattttttatgaagttcacattataaatatattcaacataattgtcatctcataacacaagagatatagcaaagtttaaaaaagtactataaaatagcaattgaatgtccagtaacaaatttggaggaagcgtatatgtatcaaacaattattatcggaggcggacctagcggcttaatggcggcagtagctgcaagcgaacaaagtagcagtgtgttactcattgaaaaaaagaaaggtctaggtcgtaaactcaaaatatctggtggcggtagatgtaacgtaactaatcgattaccatatgctgaaattattaagaacattcctggaaatgggaaatttttatatagtcccttttcaatttttgataatgaatccatcatagatttttttgagtctaggggtgttaaattaaaagaagaagatcacgggcgtatgtttccagtttccaacaaagcacaagacgtggttgatacattagtgacaactatcgaacgccaacatgtaacgattaaagaagaagaagctgttagtagaatcgaagttaatacagaccaaactttcactgtacatactcaaaataatagttatgaaagccattcgctagtgattgctacaggtggtacaagtgtccctcaaactggttcaactggtgatggttataagttcgcacaagatttaggtcataccattactgagttattcccgaccgaagttccaattacatcagctgaacctttcatcaaatccaatcgtctaaaaggtttaagtttaaaagatgttgaattgtcagtacttaagaaaaatggtaaaaaacgcatcagtcatcaaatggatatgttatttactcattttggtatcagtggtccagctgcattaagatgtagtcagtttgtttataaagaacaaaaaaatcaaaagacacagcacatttctatggcaatcgatgcatttcctgaattaaaccatgaacaattaaaacaacacatcacatcattattatcggacacaccagataaaatcattaaaaacagtttgcatggtctaattgaagagcgctacttactgttcatgctggaacaagcaggaatcgatgaaaataccacatcacatcacttatcaaatcaacaattgaacgacttagtaaatatgtttaaagggtttgtatttaaggtgaacgggacattacctatagataaggcatttgtcacaggtggtggtgtgtcacttaaagaaattcaacctaaaacaatgatgtctaaattagttccgggattatttttatgtggtgaagtattagatatacatggttatactggtggttataatattacaagtgcactcgtaacaggacatgtcgctggattatatgccggacattactcacatgcatcaatggaataatagtataaaatttggttcgattctctttagtagatcaactttttcattcaaataaaaatgaccttaatataactgagtcactaaaaagtgtcgttatattaaggtcatttcgttaattatgattctttttcgtttttagtacgtcttctagctaacaaagccgcacctgtaatcagtgcaaattctttcaatggtaaatccattccttcagaacctgtatttggaagttctttttcaactttgcgcgattcatgtgtctcttcttttttaataggcgtacaaacttttggagctggctgaatttcttttggtgatactttcgtcgcttcagctggtaatttaattgctaaaatttcatcaacaatgaattgcgtgtgttgtttgatgtcatttaatgtcgcatcttcatcaatcattctattgccatctgcaacatattgatcaattaatacttttactttagctaattgttctggtgttgcgatcgctttgaatttcgcatatgtttgttgagcaatgttatcaatgcgcagtaagctattttctttttcagtaattactgcttctatatcgcttaatgcaacattaaatcgttttaaaactgcatcaacatcagcattagtgcgtgctgtttttaattcttcatccatttgtaattttaaagcagttatagcttttaatgcatcagccttattacgatcacttacttttcgataattttgcactaaagcagtgacgcgtgcaagatcatcattaatcgttttttcagcatctggctttttaataggatgtacatctaaatcatgtattgtttgtagatttaatgatgctgttttatcaacttgtgcattgctacgatcttgatcaatttgtccaatagcagtgtcataaatattttgtaactgtgctaatatactatttctttcttctaccgttgcttgaatattcgcttcaattgcttgttttttatcgttgaataatgttgtcaattgttctcgagcagacgcctttctgttaataacaggttcgatttcacgaatttcgtttttttcattatgcaataaatatgccacatcagcattagtcactgcactagcaatttgttgtttagctttaattaactctttttcaacttgtgcaattgcaatattttgttcttcatctgtcgcttcgttatttgctttaattaaattaattttatttgtagcgatattttgaatttgttgtaatgctgttgttttaactgttgtcgctggtttaatttttgaaataatattttgagcatttatactatcttgattaacttgggcagtcttatctgcatgattgatctgatcaatagcctgattaagtgcttgttctactaaatgtttagcagctagtctttcttcttcagttgataaatcgctttgatcgattagtgcattttgagcttcggcttttacaccaacagattgacgcgctgctggtttaacttgaactttaggtaaaatcactttgatgttgtcgttgccatcagtctcagttcgatccacttctgcattcgttttgttttgtgcaatgtcatttttaattgtatttacaattttatttaaagtatcaatagcaacatctctttcatcttgagtagtatccaacgtatttcggattgcatcgagttgatttttattattttcttcaatgctatcaagcgcagctcgtttacgtcttactttaggttttatttgctctattgccttgattgtttgatttctaacatcagtaacagcagcatcttgatttgtattttctatttcttgttgcgcttgtttgagtgtgtcgctaattaattgattcgcttcatctaattcatcaactgttgcatgtggtgtatcttttattgattctacttgattttctgcacttgcttttattgcttgttgtgcttcaggcttaattacaatatgaggttgtacaccttttagtgtagcaatgccatttgtttcaacacgtttcacatcattattcgttactgcttgattgatgttttgtaatgcaagtttttcattattcgctaattgatttaaagcaacttgtttttcttcatcagtcgcatgttcagcttgctctatttcttgctttttagtctcatattgttgctttactgcatctctagcagctgctctaacaatatgttcaggcgctactaaagcaatgctatcaagcgcttgacttgttgtatcatcaacttgttgatttgttctattattcgtaatatctgtcatggcttgatttacaaattcattgattttatctagtgctacttgtctttcttctgctgttgcttctttatcctgattaatcttagcacgtaattcattcgctttttgattgattttttcacgtgcagctggtttaacttttgtttcaggttgaataattttaatcgctgatacaccatttgttgctgcttgattcacctgactattcgtttgagcttggtcaatagctgcaagtgctttttctttttcttttgctaatgcttgtgaagcaacttctttctcattatctgttgaatcaagactattatcaatttgctgttgcttttctttaacagctttttcaatatctgcaattgcctttggtttaattactacttcagcttcaacattatctatagcatttaccgcttgatttgtagttgcgtctacctgatcatttgtttggttttgattaatttgattaaatgcttgatctttaagttgattgatttgattaacagcagcctgcttttcttcgtcagttgcattaggtgtttgtttaaccgcttcaatacgcttcgccacttcagcagtgattttatctcgcgctgcttgtttttttactacgccaacttgaacagcatcgatattattctctgctactgtcgcagcttggtctacttctgcatttgtgttagcttgtttaatactttcaatagcttgttgtctgtcttgatttaaagtattgattgcagcatttttctcatcattcgttgcatctggtgtagcattgatttcagctaatttagcattataatgctgattgatttgtgctaatgctgcaggttttttaacaatatttggctgaatcgcattaattgcttttgtacctaattgttgcgcttgatctacttccgcatttgtatcagcttgatttatattattaattgccgttgctaactcttgatccacttgatttaaagccacttgcttttcttcagttgttgcatttgtgttttgattaatttcttgctttttagcagttgctaaatcatttaatacacctgtagcagtttgtttcttcgttacatgcggttgaactgcgccgatttgattgactgcatcgtctctaatactattgaccatcgcagtagtagacgtcacaccaatatcagttaatgctctatttttaagtgtattgacacgatttatcgcttcttgtttctcttctcgagtcgcgccaggtgttgcattgatatttgttatcgcctctcgcgctttatcatttacaacattgcgagcatccgttttaacttgtgttgccggttgaatcacaactatattttgtgtgccctgatcttttgcttgtgcaacttcttgattcgtatctgctgcattaatattttgcttcgctgtggctacagcttgatcaagtaattgttgtgctgcttgttgttcttcgagcgtcgcatcattattattaaatatcgtattatgttgcgtttccgcacttttatcaatggcattttttgcatctgtttttacctttgtagctggtgtaattgcttgtattccttgtatcgcatttgtcttcacttgttccacttcagcattggtattagcgtttaaaatgtttgtgtttgctgcagttacagcagcattcactttgtcaattgctgcttgtctttcttcttgagtcgcatcaggattagcattgatctctgcgatatgttgttgtgcatcatgtgatacagcatcccttgcagcttgcttaacaacagttacaggagcaattggattaatggcatttagaccatctcctttggcgttatcaacatcagcatttgttgttgcttgattgatttgttctaaagcatggttggttgcttgagttaattcgttcaatgctgcatttttctcttcctgagttgcttctctattactatttatttgttgtcttttcgttgctgttgcttggttaattgcatctcttgcagcttttttatgagttacttgaggaacaactgctccaatagtattgatgccattatttttagctgtttcaacgtcagcatttgtagtagcattcgtaacattatcaatagcatctgtttcatccgtagctaattgatttattgcatcttgaatctcgtcttcagtagcatctggtgttgcattgataatttccctttgtttcgttgctttatcacgtattgcttttttagcatttggtttaacaaccggtgttgcagtatccccacttaaggtctgtataccttgatctttgattctagtaacgccatcatcagtcgtttggtcaccaatattaccaattatttcatttttatgttcctcgataacttgtattgctgcttgtttttcttcatctgtcaattcatcattttgattaactaaatcttccatttggtcaacttttttattaactgcattttcagcatcaacacttcgaattaacgtatgttgcatttgattagttaatgaatcaatatctgcttgagaaactcttttatttaatggtacattgttacgattttcatctaaaatcgtttgtgcgcgtcgtttcagaccattaaagatatctaatgacgcaaatgtataatcagcttgttgaatacgtctgtcaacttcggcttgtaatgcatctttattcatgatgatatcgatagtatatggatttgtatttatagtatgactttctgcagctgaattaatgaaatcttgtgtatatgttttatacgttaatgtctcgttaaatgttactgttcttggtgtcggcacattatttacacgtaatttatatcttaaatcgagtattttatcaggcataagtcgtgccggagagtttgctgtacctcctccagtacttttaattgttatcacacgatttgctgcatcatatgtaacattcatatcattaacatcaacgcctgaattgttacttggaaaatctttagtcaatgaattgttcacatattcaacaccttcaggtaattgaacttgatatacaaagtcatttgtatctagagaagcaccagaattaccattattctttaatgatgttgttacagtaaactctttattatttgttgctgttggatccattgttcgtctttcaacataaacatgtgacccagaatgaagtccgatagagtcaacaaagctatagtatttgtaaccatcttttagttgataaatgccacgcgcatctgttattgcgtcatttttaggtacaaattgaattttgagatttctcacattatcaggtactttaaataaacgcaaagttggaccgccttcaacagtcttttcagcaatcgtatcattagtatcagcatttttgataataacatttgttgcgccttgaccgtttttagtagtcattgtattaaattcaaagattaattcagaattcggatttactgttaatgctttctcgataccattaaaatcgccatggtcattcgtatcagttccatgtatacgacctaatgcaattacatttccttgtgcttgatagttcttagcatcagctgaatcaaacatacttgttctaaccatcgcatgactaaacacacctactttaccaccattgataagtgtaaagcctggtaaattatcaacaactgttactgatggtacagaacggttggtacttggtctaataccattgtcatcaaatgacagcacttcgttaggtgcattttgtcctgcattattggcattaggatcagttgtaggcgtgtatggcgctgtaattgcaactggtgcaccaccgtttcctgccgctgcagccgctggatctgctggagttgcattaggatctgccggtgccgcacgtctacttctctttttcggtctattagatgctggttcagcaattgcaactagctctggtttatctgaagaatgacgaacatcttcttgaatttcctttaaagttagatgtcctcctgaaccattttcatttgttttatttggtacatttaatgtggtattattcgacactgcatcattattattagcgtttgacactgtctcagttgctgttgtattgccatctgtatgattattgttttgtgctgaaggcgtacttgattgcactgatgttggcgtagcttgatttactatactaccattattatgattaaccaatgcttgattcgttgcttgattggttgttgcagattgattaggtgtattctgcgcactatttgctaaacctctattattagcaacatctttatcttgtgaatttacaggtgttgcttgattagtatcgctttgtacattattatccgtagttaaggcttgtgcaccatttgggtttgaaagtaataaaactgttccgattaaagtagagaatatgcctactttatacttcctaatactatatttatttttctttaacaaattcatttcattttcctcctggttgtctgttctctgctgtgttgttaagaattatgctaaaaatatacgctccctcatattatgtttatagctatattattttgtacaatattttaagttcactcaattttatcatcatcattttataaaataaagttttattttattacaatttagtttccgttttgtaattaaaatcttaataaaacataacaagaacgctttagattgttttgtaacagaaagtaattcataccaaaaaacaccaagcaaccgaaacgttacttggtgtcattacaaatgtaatattattttaaattatgtcactactttaaatactttttatttccaaaccttcatcgccccatgcgtgcatgccgccttcgacatttacagcatcaatgccatttgcctctaaatattctacaactttagcgcttcgaactccaccagcacatacaatataatatatttcatttttattaaatgaatttaaattatccggaatggtatccattggaatcaactttgcattaggaatatatcccattgctgtttcttcgtcagtacgaacatcaacaatttgaactggtttagattctaaaagtttgttttttaattcatctgtagtaattgacttcatttcaaagtcctccttaaaacattatttagctacaatattgactaatttttgaggaacagcgatgactttcatgatgtctttaccttcaatactcgctttaacattgtcattagataaggcaatttcttgcatttcttcttttgatgtatctttagcaattttaattttagctctcaatttaccattcacttgaacaacgatttctacttcatcatctacaagtagtgcttcgtcataagttggccaaggttggtacgtaatagactcttcatgtcctaattttgaccataattcttcaccgatatgtggtgcaataggtgctaacattttaacgaagccttcaatgtaaggtttataaacttcatcaactttataacactcattaataaataccattaattgactaatagcagtattaaatcctaatgtttcaaagtcttctgttacctttttaacagtttggttataaactttatctaaagatttattatttgtagttacaatttttgaactcaatgtcccatcttcatttaccattaaacgccatacgcgatctaagaatcgacgagacccatctaatcctttttcactccatgcaattgcagcatctaaaggtcccataaacatttcgtaaagacgtaaagtatctgcaccatgagactgtactatatcatcaggattgattacatttcctttagatttactcatcttctcattaccttctcctaaaatcataccttggttaaataatttttggaaaggttctttagtaggtacgatacccaaatcataaaggactttatgccaaaatcttgcatataataagtgaagaaccgcatgttctactccaccgatatataaatcaacaggtaaccaatgttttaatttttcaggatctgctaacatattttcatttttaggatcgatgtaacgtaaataataccaacaactacctgcccattgtggcattgtatttgtttcacgacgtcctttcatacctgttttttcatctacaacatttacaaatgaatcaatattagctagtggagactcaccagtccctgatggcttgatttcatctgtttcaggtaacaacaatggtagctcttcttcaggaacagttgtcattgttccatcttcccaatgaatgacaggaattggttcgccccaataacgctgacgactgaataaccaatctcttaatttgtaattaactttcttttcgccagcacctttttgctctaataattgaatagctttagtaattgccgcttcattttctaaaccatcaagttcaccagaattaatatgtttaccttcaccagtgtatgctgcttcttcaacatttccaccttcgatgacttcaatgattggcaaatcaaactttttagcaaattcataatctctgtcatcatgcgctggtactgccataattgctccagtaccatatgttgataatacataatcagcaatccaaatttgtactttttcaccagataaaggattaattgcatatgcaccagtaaacacacctgatttatcttttgctaaatctgtacgttctaaatccgactttttagaagcttctgtttgataagcttttactttttctttatattcatcagttgtaattgaattaactaatgcatgttcaggacttaagactaagaatgatgcaccatagattgtatctggtctagtcgtaaatacttctacttttccttccgtattatctacatcaaatgaaactttggccccttcagaacgtccaatccaattgcgctgcatatcttttaaagattcaggccaatctaaatcatctaaatctgctaataattgatctgcatattctgtgattttaagtacccattgtttcatcggcttacgataaactggatgtccaccacgttcagagacaccatcaatcacttcttcgttagataaaacagtgcctaatgctggacaccagttaactgcaacttcatcaacgtatgctaaacctttgttatataactgtatgaaaatccactgtgtccatttatagtattctggatctgttgtattaacttcacgatcccaatcataactgaaccctaattctttaatttgtcgtttaaaagtttggatatttttctttgtaaattcacgtgggtcgttgccagtgtctaaagcatattgctctgctggtaatccgaatgcatcccaccccatcggatgtaatacattatatccttgcattcttttatatcttgaaatgatatctgttgctgtatagccctcaggatgtccaacatgtaaaccagcacctgatggatatggaaacatgtctaaagcataaaatttcttttgacctaagttatcatttgttttaaatgttttattttcgtcccaatagtcttgccatttcttttcaatttgattgtggttgtaattcaacacatttcctcctattcaataaaaaagacacctctaactattctatttacatagggacgacatttgccgcgttaccaccctatttcacaaaaattgtgcactcattttaatagtaagagatgtcattcattcaatttaaaattaatacgatttacatttagtccttaacactagctctcagcatcactagctttctgtagaaaagctccaaacgaaattaaattatacaaattaatattatgttataacgacatttatttcaagtctataacgttaattctatttactcattatgcatctatttttttaggttgcgtattattctccttgaaaaccattaataatattaatgcaaatacaagtagtagcatcataccgataaacatcatgcgcatattaaacgcatcaactaatacaccaccaagaaatggaccaaatgcttttcctactgtagcagctgaattcacaaaaccttggtactgtccttgcttaccatctggcgctaactgattggctatagttggaactgctggccatacaaacatttctccaaaagttaaaataatcataccgacaacaaatattgtaaagttttcggcaaaactcgtgacaaagaacgacaacataaaaatgatgatgccgacaaacatttgcttctttaagtttccttttaacagatagagaatcggtttaattaatggttgtgctactaaaatcattattccgttaattgtccataaaacactatattgtgccattgaaatattaatagattgtgtaaatgaagcgattgtagactcccattgaatatatgcaacccaacaaattgcaaacattgcacaaattagtactaatgaaataaatcttgctttattctttttaccagtaatatctaaatgagttggatatttaactttcgcattaatttcaatattaaattgcgttaccgcgacaagcgcaaacacaacatacataataagattggctaaaaagatatagttaaagctaaattctgcgacaaagccgcccattgcagcaccgacagccacaccaatattttgcgctaagtatatcgcattaaacgtttgtcttccgccatttggccacactgctccagccatagcgtatatcgcaggaataatcattccgccaccaaaccctaacattacaagccatacagcataccaaggccacccgtgaaagaaattaagtagcgttgtactacaaagacaagtgaaagttccaattaaaatcgtcttgtatccacctaatttatcaaatagtgaaccacctaataagtttccaataaccatgccaaatgaatttatcattagcactaaaccagcaacagttaaactttttccaagttcttgtttcatataaattgtatttaaaggccacaaaaaactggaaccagtaatatttaacgccatgccaattactagccaccagactgatttaggtatattcatatttcatagttcctctctcttttttgtcaaactataataaacactataacattaaaatatgttaaaatctgtacttagaactctttttttatagaaaggaaaatgacatatgggcaatcatttccaatacgcttttgaaaacaaacgttatcacacatggaattaccatttaaaaaataaatttggacaaaaaatatttaaagttgcattggatggcgggtttgactgtcctaaccgcgatggcactgtagcacatggtggatgtacattttgttctgctgcaggtagcggagactttgcaggtaatcgtgcagattcaatcgcagtacaatttaaagaaattaaagaaaagatgcatgagaaatggcacgaaggaaaatatattgcttattttcaggcatttacaaatacacatgcaccggttgaagtattaaaagaaaaattcgaacctgtacttaaagaaccgggtgttgtgggattatctattggtacgcgtcctgactgtctaccagacgatgttgtcgaatatttagcagatttgaatcaacgaacatacttatgggttgaattaggactacaaacaatccatcagtcaacatctgatttaatcaatcgtgcccatgatatgaaaacttattatgatggtgtggcaaaattacgtaagcataatatcaatgtatgtacacacatcattaatggcttacctggcgaagactatgacatgatgatggctactgccaaagaagttgcacaaatggatgtacaaggtattaaaattcatttacttcatttgttaaaaggtacaccgatggtaaaacaatacgataaaggtttattaacttttatgactcaagaagagtacacaaacctagttgtggaccaattagaagtgattccccctgaaatgatcgttcaccgaattaccggtgatggtccaatagatatcatggtaggtccaatgtggagtgttaataaatgggaagtattaaatggcatcgatgctgaattagcacgtagaaattcttatcaaggcttgcgttacaagtctaaggtgaagcaatgaaattagaacgtatactccctttttcaaaaacacttattaaacaacatataacaccagaaagtattgttgtagacgcaacttgcggtaacggcaatgacactttatttttagccgaacaagtaccagaaggacatgtttatggtttcgacattcaagatttagctttggaaaatacacgtgataaagttaaggatttcaatcatgtttctttaataaaagatggacatgaaaatattgaacatcatataaatgatgcacataaaggtcatattgatgcagccatctttaacctaggttatttgcctaaaggtgataaatctatcgtgacaaagcctgacacgacaatccaagctattaattcattgctatcattaatgtcaattgaaggtattattgtacttgttatatatcatggtcatagcgaaggacaaattgagaagcatgcattgcttgattacttgagtactttggatcaaaagcatgcgcaagttttgcaatatcaatttttaaaccaacgtaatcatgctccattcatttgtgccatagaaaaaatttcttaagcatttgctgcgctatactatttataatttaggattgagtagtcaacatttgaaaaattaataccaacaacaaaaagaggttttcaacttaatgaaaacctctttttatgctattaaacttacacagcaataattgcgtttaaactattttgcattgctgttgctctacttgcaatcgcatcactgatgaaattcaacaactctactttctcttgttgtaacttttcattgaaatgaataataactgttctttcatcgtcaacaggacgctctttgtaaatccattctaattcaactaaattattatacgttctcgtacgcttatacggtttaacttcaacaaatctgtccatttctttaagcgtcatagaacctttttgccataaagttagtaaaattaaaatttcttctctagacattttgtattcgctttcaatctcgctgaaaattgagttaatgtcacccaaaagtgtttctaattgcaaaatcccaaatacagtgtcgttatttacttttttcatgctaaacatctcccaattaataatcacatatttagctaccatacaagtattaacaaacatcccaacaatcccgaaacttgtatgtgctaacttatgcataaaactacaagtgtaaataaacttgctttctattcaattgtcaaagttgaataaaattaaataagtataaaaaccaataatcaatagagttaatatttagaaataagataatagtacataaaacaaatcactctattacatattaattttataatttatatacaaagaaaatatatcaatattaccattaaattgcaacaattctacatatatttcttcaaaaaagatacgcattgaatttttattacatataactctcatgaaaattgattaaactaaattaattagttagccttaaatttaacaaattaaatcaaaccgaatgaggctaaattggttatttttcaagatatgatttgtataaatcaaaacatttcttacaaatcaaatgtgtataaaatgtgatatacattctcaaccttaaaaaagtaaaaaaaaagatgagcatctactgtctcatctttttagaatattaaatttctacaatttcgtcatcttcaacaataaagcccattgtattgacgctgttatttaagaaagtcagaatataacgcattacttcatcacgttctggctcattgtgaacctcgtggtaaaaaccttgccaagctttaaaatataattcaggtgtttgatatttttctttaaactcatcaattgccctagtatcaacaattaaatccttcgttccatacattaatagcgttggcattggttgaatgtcatgaatatgagccatcgtatctttcatcgtctcattaattgtattataccaatgatacgttgctttttttaacattaaaccatcgttaactgtttcttcaacaatttctaaattacgtgttaaatcttttggttctacaccaacattaaaacgtgtgtcttttgaaattttacctatatttgaaacaagtttatctttacgattttttccattcttttgaagttctagcataggagaaattaacatcatcccctcgattggcaattctactttttcaagtaaatttaataaaatcaaaccgccaagtcctacccctaatacataagtaggaattttatattcattagctatctttaaccagtctagcaaactttcgtgatacgtttgaaagttttcaatttgtcctttattagctcttgaagtttgaccttgaccaggcaaatctcccataatcacatgatagccatttcttcttaacatcgtaataacatatgcatatcttcccgtatgttctaatatattatgagcaataacaacgacgcctttcgcatcattttcagcttcccacttccacattattatactgcccctttttcattaatcttcaataacataattatagcaaattcactatgtagatttctatttatagtattattgttgtccatattattatatataaatgaaatcaacatcaataatagtgtaattatacataattatttttgattgtttttgatgaaaacgctttctcgaatatttttttcatgctaaacttattgtaaacacaagggtttggaggagtagcaatggcactattaaagaatttttttatcggattatctaataatagttttttaaacaacgcagcaaaaaaagtgggcccacgtttgggcgccaataaagtcgttgccggaaatacaattccagagttaattaatacaatcgaatacttaaatgacaagaatatcgctgttacggtagacaatttaggggaatttgtcggtacagttgaagaaagtaatcatgctaaagaacaaattttaacaattatggacgcgcttcatcaacatggcgtaaaggcacatatgtctgttaaattgagtcagttaggtgcagaattcgacttagaattagcttaccaaaatttaagagagattttacttaaagcaaatacttacaacaatatgcatataaatattgatactgaaaaatatgctagcctgcaacaaattgttcaagttttagatcgcttaaaaggcgaatttagaaatgttggtactgtaattcaagcatatttatacgatagccacgaattagttgataagtaccaagatttacgattacgtttggttaaaggtgcatataaagaaaacgaatcaattgcatttcaatctaaggaagacgtagatgcaaattacatcaaaataattgaacaacgtttgttaaacgcacgcaatttcacttcaattgcaacacatgaccatcgcatcattaatcatgtaaaacaatttatgaaagaaaatcacattgaaaaagatcgtatggaattccaaatgctctatggttttagatcagagttagcagaagaaatcgcaaatgaaggctataatttcactatttatgtaccttatggcgatgattggtttgcgtattttatgagaagattagcagaacgcccacaaaacctatctcttgctgtaaaagaatttgtgaaacctgctggcttaaaacgtgttggcataattgcagctttaggagctacagttatgttaggtttaagtacaattaaaaaattatgccgtaaatagagcaagacataaacaataatttaggagtctggaacaataatcaatgttctaggctcctaaatgttatattggcagttctgaaacatttataaatctttgattatgaactcacaacagtgctctatgcttttatagattttaataaattagccatttcaattgcacttactgctgcttcagcacctttattgccagctttcgtacctgctctttccacagcttgttcaatactttcagtcgttaaaataccaaatatgactggtacattagtttgatcattcactttagaaacacctttcgcgacttcattacaaacataatcataatgagacgtagcaccgcgaattacgcatcctaatgtaattactgcatcataatttcctgatgaggctaattttttagctactaaaggaatttcaaacgcacctggcacaaatgctacatcaatattgtcttcattaacatcatgtcgaatcaaagtatcttttgcaccttcaagtaatcttccagtgataaaatcattaaatcgactaactacgattgcaactttcaaatcttttccaattaatttaccttcaaaattcatgttaaagtcctcctatattaaatgacccatttttatttttttcgtttccatataatcatgattatgtaccgtttctggtacgataacttcaattctttctgcaatatcaatgccatattgttttaatccctcaaatttacttggattattacttaataaattgatatgttcgatgttaaaatattttaaaatctgtgcagcaatatgataatctcgtaaatcttcatcaaaacctaatgctaaatttgcagttactgtatcatatccttgctcaattaattcatatgcgcgtaatttgtttaacaatcctatgccacgaccttcttgaggtagataaataatcatgccaccatgttcattgatatacttcatagacgattcaagttgagcaccacaatcacaacgttgactatggaaaatatcgcctgtaaggcacgcagaatgtaagcgtacattttcatgttgtcgaattgcaccttttgtcagtacaactatctcttcatctgtgtatgtcgctttaaaaccatacatatcaaatgttccgaaatctgtaggcattttcacttttgccttaaattcaatttctggttctaattttttacgatattcaattaaatcatcaatcgtaatcatctttaattgatgtttttctttaaacttttgtaaatcttgtcctttcgccatcgtgccgtcatcattcataatctcacaaatgacaccagcgggcttggcaccagtaagtttagctaaatcaacagccgcttctgtgtgtccatttctagctaatacgcctttatcttgtgctactaatggaaataaatgaccaggacgattaaaatctttagcttcactactaggatcaatgagctttttggcagtcaatgtacgttcataagcactaattcctgttgttgtatctacatgatcaatactcactgtaaattgcgtaccaaagatgtcggagttatcatcaaccatttgtaccaaatccaaacgttgtgcaatatctttagacactggtgcgcatattaatccccttgcttctttcgccataaaattaatggtattatcgttcatccattcagtaaccgctactaaatcaccttcattttcacgattctcatcatctactacaataattggttctccattttttaaagccattaaagcactgtcaatattatcgaattgcatgctacccctcctaaaaaccaaatgctcttaatttatctacagataattggtctttatctttatttaaaatattttcaacatatttaaacaaaacgtctgtttctaaatgtactttatctcctaattttttggatgataaaatcgttgaacgcctcgtttctggaataagatgaatgtcaaaactgttatcatgcttatcaaataccgttagactaacaccatccacagtaatagacccttgcttaactaactgattattaatatgttggctacattgaatcgtaataatttttgcattggctgtttcatttatttttgaaactgttcctagttcatctacatgaccgaggacaaaatgtccaccaaacctaccgttaccactcatggcacgctctaaatttacttctgattgtcgcttaacatctgctaaataggttttattttcagtgcctttaattacttgaacagtaaaagatgtctgattaaaatcaatcactgttaaacatgcaccattaacactgatggaatcaccaatatgcatatctgccgtaatcttatgtgcttcaatttcaatcgtcctgactgattgacgaatttgaacacttttaacgacacctatttcttcaacgatgccagtaaacatgcatcatcacttctttcgtaaagttaatttaacattttgatttaataactcggaatgaacaatttcaaattggttcgcatctggtatctcaatcacatcatttgtttgataaaattgataatttccagatccgccaattaatttcggggcataatagagaataaattcatctatataattagattggagaaattctgaagtagtggttggacctgcctcgactagcaaagttccaactcctcttttatataaattgtgaagaattgttgttaaatcacaagacttcaagtaaataatttcaatatgtgtttgattgcttgttaaatttggattttcagtatatatccaaattggtgttgattcatcttgataaatttgctgattaaaatgaatattcccagacttagacaatattacttttatagggttttttccatcttgaatacgtgtagtatattgtggatcatctaattcaactgtacgtcttccagttaacactgcgtcgtgtcgatgtcttaacttatagacatcttgtttaacctctttgttagtaatccattgactttgtccattatcattcgcttgtttaccatctaaacttgcagatactttcactgtaatttgtggcagttgctttgcttttgctttaaaaaagtcttggtataattgtgatgcccgttcatcatcaacgcattcaacctcaataccgtgagcccgtaacgtctcatcaccatgtgtgtctaacgaattgtcttttgttgcgtatactacttttgctatcttacaatcaataattttgttaacacagggtggtgttgaaccaaaatgactacatggctctaacgtaatataaatcgtcgcaccttcagcattttgttgtgccatatcaagtgcttgaacctccgcatgcttgtcaccttttctcaagtgtgcaccaataccaacaatcctaccttcattaactacaacagcgccaacgggtggattaacacctgtttgaccttgtaccatatttgcaagttgaatcgcataatccataaattgactcaaatgatcacctctataaacaaaaatcctcacatcatgaattaagatgcaaggagaaaaatttatcgttaaataagcctatttgtacacatttttacaaatacgctacattatctttgtcgataattaacattctttctcccatccagactttaactgtcggctctagaatctcactagatcagccactaatatgaaacatattagcaggtcgcaggctttatttactgccggttgggaatttcaccctgccccgaaagaattatatatgaaattgttatagattatttgagtacgtagtatgtcaactacatttaaaatgatactatatgttttctgaaaaaacaattaatgacggttttaatttaatataatctgagtactataggcatctcattgatatgattcttactaacagacattaaaatcaaaccttcaattcgtctctatagagcgttctctttattatcttctagttacaaattattgattgtaactgcgctgttgttgctcattcgattctaaagcatcatataattgagatactgtatgcgcaacttgttctactatcattttcacaccatttcgtagtttattaacaccgtttgtcatttgacctatcgcaatcatatttgttaatgttccaaaccttggactaataacttgattggtttccggtatgatttgtatgcctcccattggatgtgcttgtacaatttgtctattttcaagatttttaattaattgatcatcttgatccaattcatttaaatgactttttgcacctgtcgcgttaatgacaacattatacatgtctactgattcttggtttttgtatgaaaaataatacaacttgccatcatgtttcacatcttctaaatcttttttcaaaattaaagacttattttctattaattcaataattagttcagcagttcttggaggcattggatttgaatttaattgaatcatctttgagtatttttgattaaattgatgttgatcttcaatacttaagctattccatatccaatttaaattctctttcaaatgttcaatcatactttggaaaatgcccatttctgttggacgcgctaaatcatacttcaaatctgcaatatgatttcctgtacgtctatgtactaattttttaaaatcaatgtcatattcagcacattcttttaaaaataaagaaactatagtatcaagcggtgcattgccgaaatgatgttttttaatgtcatttaatttgtctttagttaagtacttgaatgtcacgtctatcattgtacctcttacacttggtaaatgagcagaacgactcgtcatagtaattggtaatttcggatgatgagcagcaacataacggacaacatctaaactggcaaggcctgtaccaataatcgcaatatcgtccagttcatttacttcgtctaacgtattatatgttggataaggcgtagcgatatatccttttttaccctttaagttatatggatcatggtaggcaaatgtaccacatgttaaaaatacataatcgtacgcttgccatgattgttctgaatttgtagtacatatgtaataagttaaattcgtttcatcgatattagaatttgtataaatctcttgaactttattataattagttgatatatttggatattttttcgtgaacatagataaataagatttcatataatgtccgaatacaaatctcggtaaatatgcaggttcatcaaaattaaaatcagtttgttgtttataccacttccaaaattcagtctcatcatctaaatttaaactcatctttttcgaaggcatattaattagcagctcagaactatcattttgaaatggtacgccctgtcccatatttactttatcatcgtataaatctatatctaattgattaaacttcgggtgcttaactaactctctcaatacacttacaccagcagttcccatgcctattattgctacacgcatatatcatccatccttttgtaattcaaaatattatatttaaactattacctataattatagcaatttggtatttccaataaaatttattaaggtaagctattatttcactttcacaaccattaaaccatttaaaacttttcatttaatatcaaccttagtgtttgtgttaaaatatttttaacgaggtgaattaaattgaaatttatagcaaagatattaatctcattagtaattctatttatgatttttagtcgtaaaaacaaagcttcttaatcaatacccttgattacaaaataaattcaactaaggtgattggccatacactcaagatatggctaatcacctttttcaatgcaaaacaaagagtatattttgcaaaatcaatatctataatttatctttaatacccttttaatactaaaaccaaattcaaattacatagtcatatcgtgtaatataccaaaggaacatagacattcatctatatagatgataatctatttaacgtctaggaggtatgttatgacgtataaagaactagcaacatttttaaaagttttatcagattcaagcagattagaaatactagatttactttcttgtggagagttatgcgcttgtgatttgttagcacattttcaattctctcaacccacacttagctatcatttgaaagcattagtaaaaaccaacttagttacgacacgaaaaatcggaaataaacatttataccagcttaatcataatatttttgagtccgtaattaataacttgtctaaggttcatacctctaaccaacgatgtttttgtcataaccttaagactggtgaatgctaatgatgacaactttagcgacactcatttttctagtaactttattatttgtattatggcaacctaaaggcctagatattggcattaccgcattaactggtgcctttattgctgttattactggtgttgtaagtttttccgatgttttcgaagtaacaggtattgtttggaatgctactttgacttttgtctcagtcattcttatttcattaatattagataaagttggattattcgaatggtcagctattcacatgcttcatgcttcaaaaggaaatggtttaaaaatgttcgtttatatcatattattgggtgccattgttgctgcatttttcgcaaatgatggcgcagcgttaatcttaacgcctattgtattagcgatggttaaaaatataggttttagtaagcgggccatattcccttttattattgcgagtggttttatagctgacacaacttctttacctttgatcgtgagcaatctagtgaatattatatctgctgattattttcatgtaggattcgttcgatattttagtagaatgattatacctaatttattctcgcttttagcaagtattatagtattgtggttatattttagaaaggcgatacctaaaacgtttgatgataataatataaagcatcctaaagatgccattaatgatttaaagctatttaaaatttcatggattgttctagttatattacttttcggctatctaatcagtgaatttactaaaattccggtatcaattttcactggaatcattgcttttatttttctaatgttggctcgtaaatcaaatgctgtaaatattaagcaagtcattaagggcgcaccttggaatatagtattattttcaattggtatgtatatcgtcgtattcggcttaagaaatgctggcattactttaatattggctaaaatattagaatatatttccaattacggtctatttagcaccattttgggaatgggcttcatttcagcgtttttatcatcaataatgaataatatgcctacagttttaatagatgcgattgctattggtcaatcaaatgtccatggcatgttaaaagaaggcctaatttatgcgaatgttatcggttctgatttaggtccaaaaattacaccgataggctctttagctacattactgtggttacacgtcttaacacaaaaagatgttaagatttcttggggcacatactttaaaactggtatcatcattacaattccagtactatttataaccctcatagggttgtatctaacacttatcatattttaagaaataaaaagacgctttctatttattgcgatagaaagcgtctttttatacttgagcaagttatatcataacttaactctatcaaattacttattcaaatgtttactgtcatctttatacacaaagtatttgaagtattttccttcagtcttcatattcttataaaagtcagcgataattgttgcattactttctgcccacttaatatcagtagcatattgatgttctcctggattttttggattccatctcatactatacaatgtattttgatctgtgcttgataagaagtgcttatgaatgaaatcagcaccgcctgaaatagctttttcaggtgtatcccaaccatgctttttagcatattctgcacctgttttaattgggtctttatcaagggctcctactccatagaaattgtagtattttttgccatcaatttcgactccattagctaattcacttttaactgcgccagtttctaataatgcatgtgaaattaaataaacttcgttaacgtgcttatctttagcagcttttaagaaatcatccgtatgtttcaataacgttggtctatctactaacatacgtttaattctatttttatcaatcccttgatactttgataaatctaaaaattgatatttttgcttttcattatcgataaaagtaccgctatccattgcacttttaatttcagttgcagatgcatctctccatgcatcattctttttatttgatacctgttgactcgtataattatttatttgtttctttgctgcatcgtttaatgtaacatttaacttttcaatcttaatgtcggatttaacatgtttgaaaaatatctgatcggatatcattgagaaaaataaaaatgagacaacagcaaatatgacaacaagtcctattattccaaaaatagaacctttcttgtgtttattcatatccacacctcttaggtcattgttgttatacattcagtttgactacgataataaagtttaacattattaaaaccgtttaacaattttatctatgcattgttacatattcataaataaacagtaatgtaaatgaaacgttttaaaccatttatcaacattactttacgttgatctacgaatcataaatgttttatctttttgtataacctttgaaaacctttatatcaataatcttattattcacgtattaaaaaacaaaaaattcttttgttcgtttacttagtttcttttttataatccatcataataaaacttgctgcatttgatctatttttataatagtactgatttaaatcaatcgtgccttcaatttgaccatcacgatacatcatttcattagtgaagttatttatcatcacgaaatcagcgcgatctcttataacatctaaatcgtcgtttcgtgcaaaaaaatgttctaaatttaaatgtgcgtaatccattgttacctcccgattacaaattttgttctatctactatttagcaaagtaataatacatcatatcacattaaattaattacttatgtcttatatttaacacttaatttagcgattacgcaaatgaatgatttttctaaatattttattctaactttatccggaaatatttgttatacgtataacttggagaatgactacttgaaatttaatgacgtatacaacaaacaccacaaaatcatacaccatcttttaaaaaaatataatattagctataattatgatgagtattatcaactactcttgataaaaatgtggcaattgagtcagatatataaaccctcaagcaagcaatctttatcctcttttttattcactcgattaaatttttaccttatcgatttattcagacaacaaaatcaattaaaagatgtcattttatgtgagaataattcaccaacattaactgaacaaccaacatactttaatgaacatgaccttcgtttacaagatatcttcaagcttttaaatcaaagagaaagactatggctcaaactataccttgaaggatacaagcaatttgaaattgctgaaatcatgtcattatcgctttcaacgattaaattaattaagatgtccgttaagcgtaaatgccaacataattttaattagtttattgtgaaatttcggtcgatgtgttaatgatgttgaaacaccctaacatcttcatataaatttattttaaccattaaattaacaacttattatacgaggagtaatatatttgcaagacaattctactaaatatctactttatatccaaactgctacttcaaaccatctcgaaacaaattgtgtctttttacattgcgattacattcttaaagttccaattaacaaactcgtttcatattatgcgaaattgcatttatcatcacaaagtgtgctaattgagactgcaaaaaacatactaaatattaataaactggttcctatttacatcaacccaaaaactatactttttccgttaaaacataaacgtgcaccgatacaaatttatatcaatgcacattatattgttggtatgactgccatagagaattcaacattaatacattttcaagaaggcattcagctagaagttgatgagccattttcactagtttcaaaaaaatgtcatgaaagtttagctttgaagcacttcattgaaaatactatttcgaattaaatttaatttctaaaagtttcttagtaaagtatgatgtcacaatttttataaaatatatgctaacaatcattaataaaatcgctccaataattgttaaaataacaacagttgttgataaatctaccttaggactaacgaaaaattgtacgccagatagacttgtaattagcccaaataaaaacaagcctaataaagcaacataagcaaacatcatcactactaatgtaacaaacatactataactttttgtttctttatttcgaaatacattttgtcttaagtaagcattagcaaaggtaacaggcttatttaagttaacgctgtcatcatcagatatagaagacaatcgttgatctaatgcttgtttctccttcttgttcaaaaaccataattgctttttaacttttttatcaaatgatgctttattcataattaaggatttctctcctttataatattgacgtaattttaaacattagcgtcaattgaaagtgtattttatatattttacagaaatatatgtatcaaatctacaaaaatccatattacaatttcatttatggtgatttgacgctaaaatacagtctgctaattttccaaactaatgctttttaggtaggtacaatgataaattttaatcgtatatatgtttcatatataatgaatctatccttaaacatattgcattcaaaataattttaaaaaatgaaaagaaaggatttagcatgcaaaaattcaaagactttttttacgatgatttatcggttacacgaggaaattattttttaactttaatggcagcattttttattactatcattttatttatcggcatagttgtcagtgaagtacatttactttatagcatgctaattgtattagtaggtttaattctattgaggctattcaaaatcaatttattctcttttaaaaaattaacattgtctcaagttatttatattataggcggtgcactattaatttatgggttagataatctttatttatattttcatgacgtaccggcaaatgaacaacaattagagcaagaaatacgaaatacaccattctatatttctattttcactgttaccatcatccccgctattgtggaagaaattgtttttcgcggtatgataataagggttatcttcagaaaacacttgtttttagggttaattgtgtctagtttagtttttgcatcattacacgaatctgacacttggattggttatttaccttacttatattctggtttgatttttggtataatttatataaaaacaaaacgattagaagtggtaatattcatgcacttcttaaataacttgttagctctgctctttataatatggggataattttgagataacctttcatattattttcaaattatctatctgatatttattttattgaacttgagtcaccacttaaactcaaaaatacgtgtcatcaagtgcaaaataatttagaactaatacaaacataaaaacttttgctttacgcttaaaatcaaaagtcacatacctagatataagtacaacttgtatattttgtactctaataggtatgtggcttaaataatatttaattcttaagttgcatatagtaattgtttttattcattttctaaaatatgcgagactaatttccttttctactcctgttgaatcaatttagacttttttataactcgagcttttacttagctgaattttgacttcttcttcattaataactattatggaaaaaccccccataagcacaatgcctatgagggtttaaatatatttatatattatagaatagaaagacctgaagattgaatatctttcgcaaagcctttaactgtatctactgataattcgttaatatcgcgacctaagtttgcattcacttttttcacaacatctgcagggcatgtaataatatctgcaccaatttcatcagcttgaatcacattgaataattcgcggcaacttgcccataataatttaacgccgtctttactatgcgtaacttttacagcctctttcattaatggtaatggatctacgcctgtatctgcaatacgtcctgcaaatactgaaacatatgttggcacaccttcagttactgcttcagttatttctttaacttgttcaattgtgtaaacagccgtaacgtttaatctcacattgtcagctgaaagctttttaattaaaggaatcgttgattcaccttttgtatttacaataggaattttaacaaatacattttcgccatattgttttagaattgctgcttctttttccatagtttctaaatcgtctgcaaatacttcaaatgaaattgaagcatctggaatttctttcacagcttcttcagcaaaagctttgtaatctgttacgcccgctttcgccattaaactaggatttgttgtaaaaccatccacttgtttgtttttataagctgctttcatttcttcaatatctgcaccgtccgcaaatacttctacatttagtttagccatataatatagcctccttgattcttattaaaattttaacaacatctgcatgtctttttcttacaaccatttgtaaaaaatgatttttatttctttgttatataaaacatttatatcacgcttttataatatatagctaattttttgcctatatttttaaaaaatgactttagtaaacattgtgtctacaagttaataaaactattgttttatgattgtttatgatacgatatgtaaatgataaccatccaggaggtctagcatgtctcgttcaaaaaaatacttttacttatctagcttaatgattattttaagctttttctttaatacaaataacgttttcctaagtggactttttaattcttttattaaattaatacttttctgcagtgttattaactcaattgtactaattttgtctataatttttgcagatcgttcaattaaatcactaaagcctgatgcagattggattagaattgcgagtaaaagtttgccttggattattctaattgttattttagtacatatcttttcaattgttcgtacattcggttttatttaaaaaagataaaatgtcaatgtagccttaatacaaaacaatacaatgtatcatgctataatgagtaaaacaatttgatgacgttgttgcgtataaaaaatattagattttcgaaatcataactatacatctaatcgctatagttatacaacaagatataacatataatgaggtttgataatgcatcgacaatttttgtcgtcgcgttgccaaaacctcttttttaaattcaaactacttcttttcgaggtgaaccaaatgcaatatgtatatatttttatcggtggtgctttaggcgctttattacgttacctcatttcttttctgaatactgacggaggttttccaatcggaacactgatagccaatttgactggtgcctttgtaatgggattgctaacagccttaacaattgcatttttttcaaaccatccgacgctaaaaaaagctattacgactggttttcttggtgctttaacgactttttcaacatttcaattagaattaatacatatgtttgatcatcaacaatttataactttactactatatgctgtaacaagttatgtctttggtattttgttatgttacgtcggtataaaactaggtggtggtttatcatgatatcaatcattttagtcatgattggcggcggtttcggtgcaattactagaagtgccattactgattattttaatcataaatttacttcaaagttacctatcgcaacattgatagtaaatctagttggtagttttttaattggattaactataggcttatcaatttcaatctcatggttccctgcgttctttgttaccggttttttaggtggcttaacaactttctcaacgttagccaaggaacttacactaatgatgacgccaaaatttaatattaacctttttctcaattattcacttttacaattcatcattggatttatagcttgttatattggctatcatatttaaaaataaaatgcttcattcagcaaataggtaaattacgacaccttcctgaacgaagcattttttaattttcatgcaaattttttagcaccataaaatgcctaccaaatttcaataatctttgttaccgtttaaataatgtgaatgtcaataaattctccaaactagtcgaaaataaagggagtgggacagaaatgatattttctcaaaatttatttcgtcgtcccaccccggcaaggttgactagaattgaaaaaagcttgttacaagcgcattttcgttcagtcaactactgccaatataacttcgtagagcatagaacattgatttatgtcccagcctgtgacaatccatctaaccttttcatcagttgagtgattttaatctatccttcaaaagtttttggatcaggtccaattctcttatcttgatttaaaccatcaattcgcgtcatttgttcatctgataattcgaaatcaaatatttggaagttttcagagattctgtttggtgttaccgatttagggattgtaaccacaccatgctgcacattccatcttaaaacaacttgggcaggtgactttcctaattcttgagcaatgtctttaattgtctcatcatttaaaatttgtgcattcatcaatggtgaccaagattccatcacgatatgttgtgctgccaaatataatttcaatttatgttgcgttaaatatggatgatattcaacttgattaattacaggtttaattgacacttgtgccaacaaagcttccaaatgttcaggttcaaaattgctgacacctatatttttaactttattatttttatataaatcttccatacctttccatgtatcaaccattacggcttcgttcgtacctggccaatgtactagatacaaatctaagtattttaaacctaatctagataaactagcttcgtaagcaactgctacattttcacgaccgaaatcctcaaaatataattttgaagtaataaataagtcttctctagcaataccagttgactccaatccggcacgaatgccagcacctacttgttcttcattcccataaacttttgcggtatcaatactacgatatccttgttcaatggcatacttaacactttccatgcaattttcatcattttccacacgaaatgtccctaaaccaatttgtggcatcgtgtttccattataaaatgttttaacctccataaatatcgcctcacctttttgatgtattataccctgttatcataacaaatctgagttgaatacatgagaaaaaacacttagagaaatcaaccactaaaattctagtaatatctctcaaacattaatcaaaatgtaaaagcaattctgtttaaattatgacaaactaaaaaagccgaagtcacaacatatagtcatcacttcagcctaacatttagttgaatgattcaattttatccatcatttgttgtaagtcttccacgttgtattgaatacgaccatggaatacaaatttgttaaagaactcgtctaattgttcagcaccgacaagcactttgacagcactattttgattataatttgaaatcgttacatcgccttcatttttaggattaaagtataaaattgaagttggcgtatatttggcacctaattctttttgtaagtcttcagccaattgtttaatcgcctcaatttgatctgaataatttacaaaagataatgaacgtttgtcatcattttgatccatcacaatagtttgtggtctagatttatctaaatccaatgtatcaaatacttgttccattggtggtaaatctttaaattgaccgccactaataccattataaacatgaccttttaacaattgagaatcaataatataaagaccagttcttgttaatactaaatgactaattcgttcaatattattaaagccatcctttggtaaaaagatatttgccataatgtgcatatcttctggtcgaattcgtttttctttaactaatctttcacgaataccaattaatctcatgtccgttacatattcactatgatttttcgagaacaattttaatgcgtcaatctcacgatcttttgtactaaccatgtgattataatcttcttgttgttttgtaattgtctttttattttgaatacgctctttctctaaagcttcttcatgagactttttaatgttttgttcttgttgttcatacttttcttctgtttgtcgcttaacttttttcttactacctaaggcaactaagaaaaggacaaaaaagattaatgcaatgactactgcaataatgagtccaatgactaccggtgaagataaatccatcacaacaacgctcctttttaatatatgaataactttaattataatagaaaagctaaagattttcgatacatattatcatttatatatcgaaaatcttttatttagctatattcaattcatcttattattttactgcgtcttttaattcttccactttgtctaatttttcccatgggaataagacatctgtacgtccaaaatgaccataagcagcagtttgtttgtaaattggttgtttcaaatcaagcattttaataataccagcaggtcttaggtcaaagtgttttctaactgcttcaacaagttgcccttcagaaactttacctgttccaaatgtatcaattgcaattgacactggttctgcaacaccaatcgcatatgccaattgtacttcacattgatctgctaaacctgctgcaacaatatttttagccacataacgtgcagcgtatgcagctgaacggtctacttttgtaggatccttaccactgaagcatccgccaccatgacgtgcatagccaccgtacgtatcaacaatgattttacgtcctgttaatcctgcatcaccttgaggtccaccgattacaaagcgtcctgtaggattgatgtagaatttagtttgttcattaatcaagttttctggaacagttggataaatgacatgtgctttaatgtcttcttgaatttgttcaagtgtcacatcctcagcatgttgtgttgatacgacaatcgtatcaatacgtactgggttatcattttcatcatattcaacagtgacctgaactttaccgtctggtcgtaaataatttaacgtaccatctttacgcacatctgataaacgttttgccaattgatgtgataaataaattgctagaggcatatatgtctctgtttcattcgttgcgtaaccaaacattaaaccttggtcacctgcacctgttgcttcaatttcttcttcgctatctttatcacgatactctaatgctttatccacgccttgtgcaatgtcaggtgattgttcatcaatcgcagttaaaattgccattgtttcataatcataaccatattttgctcttgtgtatccaatttctttaattgtttctctaacaactttcggaatatcaacatatgttgttgtagaaatttcgccggcgatcaatgccatacctgttgtaacagttgtttcacaagctacacgtgcatttgggtcgtcttttaaaatagcatctaatattgcatctgacacttggtcagcgattttatctgggtgtccttctgtaacagactctgaagtaaataatcgtttgttatttaacatagtttgctcctttaaatttatattacgaaaattctctctctgtgagctaaataaaaaagaccttctaactattaatatagagagaaggcctaatacgtccattcgctcttatcgttcagacctatttgtctgcaaacggtttggcacctttcttttataaaaaaagaggttgctgggtttcattgggtccatgtccctccaccactcaggataagagaatccgttaaaaataatagtacctaattaatgaattaatgtcaatttttcacaaataaatttacagtaaaatattgtagattaattatgttaatgtgttatactaattaaatgtaaaggcttacatttaaattatcgctttggagggatttaggatgtcagtagacacatacactgaaacaactaaaattgacaaattactgaaaaaaccaacgtcacattttcaactttcgacgacacaactttataataaaatcttagacaataacgaaggggtattaacagaacttggtgctgttaatgcaagtactggaaaatatactggtcgttcgcctaaagacaaattttttgtctctgaaccttcatatagagataacattgattggggagaaattaatcaacctatcgatgaagaaactttcttgaagttataccataaagtactagactatttagataaaaaagatgaactatacgtatttaaaggctacgctggtagcgataaagatacaatgttaaaacttacagtcatcaatgaattagcatggcataatttatttgctaaaaatatgtttattagacctgaatcaaaagaagaagctacaaagattaaacctaacttcactatcgtttctgcaccacattttaaagcagatccagaagttgatggtactaaatctgaaacctttgtcattatttcatttaaacacaaagtcattttaatcggcggtactgaatacgctggtgaaatgaaaaaaggtatcttctctgtaatgaattatctcttaccgatgcaagatattatgagcatgcattgctcagcaaacgttggtgaaaaaggcgatgttgcattattctttggtctatctggcactggtaaaacaaccttatcggctgacccacaccgtaaactaatcggtgatgatgaacacggatggaataaaaacggggtctttaatatcgaaggtggctgctatgcaaaagcaattaatctttccaaagaaaaagaaccacagatttttgacgcaatcaaatatggtgcaattttagagaacactgtagttgcagaagatggttcagtggactttgaagacaatcgttatacagaaaacacgcgtgccgcttatccaattaatcacattgacaatattgtagtaccatcaaaagcagcacatccaaatacaattattttcttaactgcggatgcatttggtgttattccaccgatttcaaagttaaataaagaccaagcaatgtatcatttcttgagtggtttcacttctaaattagctggtacagagcgtggtgtgacagaacctgaaccatcattctcaacatgtttcggagcaccgttcttcccgttacaccctactgtttacgctgatctattaggtgaacttatcgatttacatgatgttgatgtttatcttgttaatactggatggactggcggaaaatatggtgtaggacgtagaatcagcttacattacacacgtcaaatggtaaaccaagcgatttctggcaaattgaaaaatgcagaatatacaaaagatagtacgtttggtttaagcattcctgtagaaattgaagatgtaccgaaaacaattttaaatccaattaatgcttggagcgacaaagagaaatataaagcacaagcagaagatttaattcaacgttttgaaaagaacttcgaaaaatttggtgaaaaagttgaacatattgctgaaaaaggtagcttcaacaaataaatttgaatactaattaaagagccaaccgttgttatagtctaacaatggttggctcctcttattttatgtgctaaaaatttataggcaattttattacaacaatgtacatttaaggtgaccttcatgccaaaatcgcatcactcatttaatggaagcagcacgtcttcatataaagtaccgatccctaattcaacgcatgtagtaccacatcttcaaagcttgatagttcccatgcgcacaccacgtttcatactagctatgcaactctacttggttcataaactctttaatataagtcaatgtttcaaccatcgctggtggtcttggcacatgtccttctgccatttgataaaatgtttcatgcgtggcaccttttaactctagttggtccgctaaataatacgcatgatgaataccaacttgctggtctttccctccatgtacaattaatattggcggactgttttcattaatgtttggaatcgcttggcgtgcctcatatgccgctcgatcttttttcggatgaccaatcattcttcgtagcatgcctcttaaatcgacacgttcttcatacattaaatcaatatctgagacaccaccccagattgtataacttgttactggtaagtcttgaaatgtcaacaatccttgtaaaccacctcgcgaaaaaccaaccatgtggataaatgcatgtggatatttatcatgtagcaatcttaatagttgcgtcacatcatttaaatcgccacgataaaattcgtctttaccttcactcccattgttacctcggtagtatggcccaatcactaaagtttgactatctgaaaattgcattaatctacctgcgcgcacacgtcctacttgacctttgccacctcgcaaatatactacaatgcgatttacttcatgatgtggtgtcatcattaaagcttttacttgtaagtcatctgacaaatatgtaatttcttcgaattgatgcgtaaaagattcaattggcattcgtttacgtttgataaaatccaagtgattgcaccctctctacgcattttaaaatggtactatcttgcagtaagaaactccgttgtgcgagttcaatatcattgatacagttaaacaacactggccctgctgtttctaaataatcgttcttgcttaccaatgattcaacttcgataaaatatacatcttttacaaaatcagtttgatcatgtgtttcaatggtatattgtgctatgtaatgaatatttttaactttggcgcctgtttcttcatataattcacgtgtaactgcttcagcactactttccccgcgttcccttttaccaccaggaaattcaatcccccgtaaattatgtttggtaaaaagcaattgatttttaaacgttggaatagctagcacatgattgccatctgctatctcattatcctttttaaatgtcaaattaacttgacgattatctttatccctaaacttcacgcgcatcacatccctacattgtatgttaatataatagttaattactatcgttggaggcattaattatgaaaaagatattcttggcgatgattcatttttatcaacgtttcatttcgccactcactccaccaacttgtcgtttttatccaacatgttcagagtacactagagaagcgattcaataccacggtgctttcaaaggcctttatttaggcatccgtcgtattttaaaatgtcatccgcttcataaaggtggctttgaccctgttccgttaaaaaaagacaagtcagcaagcaagcattcacataaacataaccattaatatggttgtaattgagttatatccactaaaggggggcgaaattcgagtcgcccctcttttaatatgcctgaatgcgccaccacatcttgatcaaaataataacctgctggtgtaacatctcctggataatcacctttacgagcaagcatcgctgtaaaataacggcttaaaccatattcgtacatgccgccaataaccacttttacaccatgacttttcaaagtatcaattgccgtttgcactttatcaatgccacctagacgaaatggttttaatacaacaactttcacattgtataattctatcaaattaattatgtccaacaacgatgttgccttttcatcaagggctattggaggtattgttccatccactacgtcatcaagcatggagatatctttaaatggctcttcgatataaagaacctgttcacgcgctaataactgtaactgtgtgaaatcttgacgatccaaggactcatttgcatctataaccaattgaaagtgaaagtctaattcccgtaacactctaatttgatgcatgatttgaggcgtccattttaatttaattctggtcggctttgttgctttcaatgactctagttgtttatttgataagccgctcgctgtcgctccatatgctactgaaaatgaaggcagtacatgaaacatttgatacaatgccatgacaatagttgcccttgcagcaggcgtattttccaatgaatctactaattttagtgctgcttcatacgtttcaaatgatttatttctattatcttcgaaccattgctcaattacatgtttcactgaagcaattgtttcatgatcataccaatctgtttgaaaagcgttacattccccgaaatatgcatttcctttatcatcaatcaattcgataaacaaacaatcacgatgtgttaaagtgactttcggtgttacaatttgtgacttaaatggctcactatatttataaaaatgcaaagctgtcaacttcatcaaatcatcctctatacaacttatttctttgtaatttacctgttgatgtataaggtaaagtatcaaccttttcaaagtgtttcggtactttatatttcgctaaatgttgtgataaatatgcaatcaattgtgcctttgaaatgtcactttcactgacaaaatataatttaggcacttgtccccaagtatcatcaggatgccctacacatactgcgtcactgatacctggaaattgcttcgctaccgtttcaatttgatatggataaatattttcaccgccactaataattaaatctttacgtcggtcataaatcatgacataaccttcatgatctatttcagcaatgtcacccgtattaaaataaccattttcaaacgtacccgttaaatctgttggatacaaatatccattcatcacattggcacctttaatcattaattctccatgaccttctttattaggatttttaattttaacgtctacattggcacttggcatccctacagtgtcaggacgtgcatgcaacatttccggtgttgctgttaaaaattgtgaacatgtctcagtcataccaaatgaattataaattggcaggttatattgtaatgccgtctctatcaaagtggcagataatttagcaccgccaagtaatattttttgcaaattataaggttcatgtaaaccttgttgcataagccaatttaaagtttgtggcacaagcgaaatgtgcgtgatgcgttcatttttaattatcgttaaaatttgttcggcattgaatttatcaacaatgcgcacagtaaacccttcaataacagctcttaaaagtacactgagacccgaaatatgataaatcggcaagacagatagccaattagtatcacgatcaaatcccaagctctctttacatccgattgcactggcataatgattacgaaacgtttgcggcaccgctttttgagggccagttgtccctgatgtaaacataatcgatgcaatgtcatctaaattaaatgaagtatttaatatgttggacggcgactctttcggcaccacagtttcattcgatgtatcatattggatatccattgtgttgtccaacaaaccgttcattgtaatatccgttccagcgaattcaatatcatccagcgatacaatttgaaaccctcgcaattccagtggcaaggtacaaaaaatcaattgtacatcgattgacctcatctgattcttcatctcattaggtgtcaaccttgtattaatcatcgcaatttcaatatttgccaaccaacaagcatgtattaaaatgatcgattgaatcgaattatctatgtatagcccgacacgagattgttgataagccttgagtcttttagccaatagactcgcttcacagtataaattttgataagtataagattcttgaccgtctgttatcgcaatatgatgtccattttgttgtgcttgtttatataaccaaaagtccatacgctattcctccaaattcatctaccttataattataacgattttatgacattctagcagtggttatgtttaaaaatataaaaaagtagacgaattgatgcattgatatgattgttataatgctcaatacatatcgttatatcattcgtctactattatcagttatttttatttaattttagtgtcattctgtcattttgatgtggtgatttacccattgttgccacatcatctgcaatgtcaattggtatacgattcatgtcttgtaatacacttaaatggaatacttcatcatctaaattttcaatgagatatacataatatgttatcttatcctttttatattttaacgttttccaaaagtccgacttgcaattcaatacattatccggaatatattcaataaataagtaacgtttgctgcctactttgtctacgaaatattttacagtgcctttttctatacctcttatatgtgcatagtctgctgaaaagtaaatactacctattgtttcattatgttgttgtatttcaaatcgttggcctactattttattatttgtgccacaactacttaaaaaaatcagtagatatagcattaaacatattttcatccccttgaattttaaagactttttcaaaagcaacacctctaaaaataaatacaatatattatatcaaatagaaattattattttgttaaattatgttgtcatgttcgtgtcattttgagtcgtaatacaactttacaattattaaattaacacttctacaatccaaaaatatttttaaagttttgaaaaaaattaaagtatttccactactaatttggtaaaatatgattatgtgatatagtgaaagcgttttacacttaataactccctcttaaatgcatccaggttttatgtagtaaatcatgaaaataacatataaatatagaggagatttacctttgaatacagagaacaacaagaatcaaaaccgatctgttaaaaattctgaaagacgtggcatgttaaaaggatgcggcggttgccttatttctttcattttattaataatcttattatcagcctgttcaatgatgtttagtaataatgacaattccactagtaatcaatcatcaaaaacgcaattaactcaaaaagatgaaaataaaaatgaagataagcctgaggaaaaatcagaaacagcaacagatgaggatttacaatcaaccgaagaagtacccgcaaatgaaaatactgaaaataatcaacatgaaattgatgaaataacaacaaaagatcaatcagatgatgaaattaacacaccaaacgttgcagaagataaatcacaagacgacttgaaagatgatttaaaagaaaagcaacaatcaagtaaccatcatcaatccacgcaacctaagacctcaccatcaactgaaacaaacacgcaacaatcatttgctaattgtaagcaacttagacaagtatatccgaatggtgtcactgccgatcatccagcatatcgaccacatttagatagagataaagataaacgtgcatgtgaacctgataaatattaaacaacaagcgaattgaattcaaattgtatttagctttatgcactaatcacatagtaaataatgagggagattttttaggcatgagcaatcaattcaaaagcgaagaagagcgaagacaatgggaacaattccaagctttccaaaatcaacaaaaccaacagaaccagcaatacggacaaaagaaatctaaaaaaggatggttctggggctgtggtggttgtctagtattatttattttaattatcatcggtatttcagcttgtacagctggtattacaggtaaccttggcggaaatagttctaaagaaacgaacaaaacccataaaattggagagactgtaaaaaatggtgatcttgaagtcacagttaattcagttgaaactatgaaatcagttggtccatctatcgcgccaacaaatgctaaaggtacatttgtcgttgctgatgtgacgattaaaaacaaaggtaaagaagcgttaacaattgatagttcaatgtttaaactgaaatctggtgataaaacatttgaagcagataatacaggctcaatgtctgctaatcaaaatgacaacggtagtatagaaaattcatttttcttacagcgtataaatcctgatagcactgctcaaggtaaaattgttttcgatgtgtcagaaaacatagccaacgcaaaagataaaaaattagaagttatttctagtttatttagcgtcaagaagattacatttgatttatccgatgctaaaaaaacatcaaaagctaaaaaagacaagcaagatacagaagtagctgctgcgagttcaaatagcgataatgtaagttatgaagcttcggctactacacctgctacaacttctagtgcaaataatgattctgaagaaaatgaacagtctagtaaagatgaagataagcagaatgcgtctaaaagtgataaatctagtgtagaaaaaagtgaatctaatgaagaaactgctactgtagaatcagcacctcaaagcaaacctgttacaagtgaagcaccacctaaccaaaataatcacaacgaagatagcatgtacgacgcttcaacagaataaaatttcagggtagctcggctacccttcttttacggaaaaataagtatacatagcaatataaggagataaaaaaatgaaattcaaagctatcgttgccattgcattatcattgtcactattaactgcttgcggtgctaatcaacataaagaaaataatagtaaatcaaatgacactaataaaaagacgcaacaaactgacaacactacacagtcaaatacagacaagcaaatgacaccacaagaagccgaagatatcgttcgaaacgattacaaagcaagaggtgctaacgaaaatcaaacattaaattataaaacaaatcttgaacgaagtaatgaacatgaatattatgttgaacatctagtccgcgatgcagttggcacacctttaaaacgttgcgctattgttaatcgacacaatggtacgattattaatatttttgatgatatgtcagaaaaagataaagaagaatttgaagcatttaaaaagagaagccctaaatacaacccaggtatgagtgatcatgatgaaacagatggtgagtcagaagacattcaacatcatgacaatgataataacaaagcaattcaaaatgacataccagatcaaaaagtcgatgataaaagtgataaaaatgctgttaataaagaagaaaaacacgataacggtacaaataattctgaagaaactaaagttaaataagggtatactttgattaatcgtaatttttaggagaaccgctatgataacatttgaaaatatacaacaacttgaaaaatacaccttaatgactatgcatggtctttttaatcaacttaaactcggtattatttcaatcgacaatgcagagcatacgctctttacaccttatatgatggaaacactctcttccctaggcatgaaagacagcattgtcgatttaattcataaagggactgaattagaagactttgcagcatttaatttatcaattgaagatacagttacagtctgtttacaaagaactgaagaactattaaatcaatacaaaaatgtggaattcaatgacaaaatattaatcaattggcgtattatgcaaaagtaatagacatataaaagtcgaacgtaactaaatggatattgattttattctttctaaattacaagtatttcattttataaagtttgaaaagaggtatattgaagtggagaaaaatgaatatatagctaaatataatgaatatagtcaattattagacgctacatactcgcaagccgtagcataccttttaaataaatatggcgctgtaaccgatgactattataaggaaaaatcatacacgcgatttttaaatggagaaatcaaaagtattacaaaaggaaaatacactagagctggtgaaggattatattgtcatcacataagcgaagacaaattccaaaacttatctgacctaagattcatttccgaatttaagtactcatacaactatcaaaagaaagaaaacttagtttactgcgatttaatcgagcatttaattttacatgcaattattacaaaagaatccaatggccaatttggtgtggctggattatgtcaaatgatcaaaccaacagtcattgattggtacattagcgaatataatccaaaaccagcatggatgcaagccaccaaagcacgtgcctatttgcctagaatattagtagagaaactactcattaaaattgacgatatgttaaaagaaatagaaatatatgatttccttgagtctagataaatgattaatggagatttattttttgctgttgagattttgttatagatgtttaaacccataattaaatatattttataaaaatagaccacgcatacctatctttaaacggacaatgtttataaatgagtttgcatggtcttgaattgtattagttttcttttggttttaataaatcgactagattttcacaatatttatcaaatatgtattcctaaattatacagccttaatccagcagctactttcgaaacttccaacttagttgatataaggttcaatagtttgtttcattctttttcagataaaccagaacttaaattgatattattgacttcataaaaattatagactaatgcctctatttgctttttaggcataagtaagtcgactgaaaactgatttacgtcgctttcataaatcatttcatgtaaattctttagactattatcgttgttatctttaattttgtataaataacggccgagttcacgagctattgcaaatcttgtattattaatcgagtgattattattgatataaatcgttcttccacttaaataacccgaagtattaccctccattttaatatatttaacttttaaattaagttgaaataatagcttgtctatgtcaatagcaaagtgttcagaagtaataaaaagttgatccattttgtccttaactaatggctgaattaattgaactatttctggttctaaaatatcttcataatgaactttctcaataactttcaattgattcccctccctaactaaaaaatcgaacctacatcatttaataaatttaaaactataggtgtaaacattattaaaataaaacccctccactactaaatgtaacggagggacatgatttcaaaataaaatgtcattttttataaatttattataatatttttcatcatactgtacaaccgaatctaatccaacgatcccgaaaagaagaacaacggcggttctgcttcatattcacttttatccaagtgttcatttttaattatttgatcgacggttttccaattttttacttcttgctcttttaatagtttcccaagtttttcttcgtcataccctatatctctttgaaattgctttctaccacctacattaataaaagcttgaaattcatagcctttattgttatttatataaccacctataaaataactatccattggcgactttttaaatctcgttactttaagtgagttataatgattcaggttatacttaaaaaataaatctattctgttttcttgcgtctcaatgtaatggtcttttttttgtttattatgcgcatatgcaataactattatagctattaaaattacaccaactattattacgatatatttctttttcatcactctaatctcccagaaaagaagaataacggtggatcggcttcataatcacttttgtccaagtgttctttttttataatgtctgtagattttaattcatttttatggtctttttctttaaataatttaccaaatgtcttatcatcgtatcctatgctatcttcaaattgatgattgtcagttgcagagatgagaactttaaaatcataatttttgttgtgattaacatatccatccacaatatagccacccataggcgtctttttaaaactagtaattttcattgaatgataattattaaggttatatttaaaatataaatctattctcttttcttgtatttcaatgtaatggtcttttttgtttttattgattaaatagccagtacttattaagagtgctataattaaggaaattataaatattattttttttctttccatttttttcatcctcactaaatttaatgttaaagaggtaatcttatgaaatatacagacaaaatctatcataaagtatctgacttttcttattcaaagttaaaaaaagataacacttataaaattttaggccaagattacaaagtcatcgaaaaacgcgacgacacccagaatgggtttagagcatatgttttcgctccagtaatcaaaggtaaagttgataagagtcaacttttaataggttacgctggcactgacccatatagtctaaatgatattcgtactgatttacaacttcccattcatcataacacaaataatctaaaaattaataatcattataaagatttaaaaaactcaactattcacaaaaaatacaatacaataaaagataaaaatgacctttttagtttttcttctaatttaaataataaagcacttttcggtgatctatgggcagctaagtttgcaccgactcaaatggacgaaagtgatgcttttactgaatcagttaaaaagaaatatccagatagtgaaattcacccattaggacatagtttaggtgcgtttttagctcaatataatttaataaaacataatctggataacggtacaacgtttgcagcacctaacgtataccattcatttactggagactttaaaaaagacattgataatggtgtctatgattcaaaaatacgcaatattggccattttgatgatcctattaataatttgaatttttttaatcctcgtattggcaaaaatattacatcaatgccacattatgatggatttataactaaccttcctttgattggtcaacacacacttaaatcttacaatgatttcgatgcagatggtaatgtgaaggaaatgccagaacttgaacaatttaatgatgaccaatctcttaataatagatttcaattatttgacccatttggtataaaaagcagatttttcgactctattaaaatcgatagttctatattaaatagaacaagtgaaaatgattttgatccttttgctattctcaataaaaaagataaattattcgaatcaaatgaccttgatatagaaggatttaataataaacaaaaagaagatttaagcattgatttaaatccttttgatgatgaattacatgatgaggacgaaccattaattcccaaaagaggcgatagtaaaaaattaaaagcagaaaagaaaatctctgtaaaaaaaggtaaaggtggttccaaaaatacatgtaaaaaagtaaaaatccagcctgatgaagtgcgtaatatcgccaacacaattcgtgatagactatttttatataatcaaatcactaatgcattggatgaatataaagaagaaacaatatcaggggctaatcgcattttagataaatatcaatcggagcttctaagcggttcacatgaatttataacaccttacgatcttgaacaatatatggagattttagcagttgagggaagttcaggaaacttcaagttttataatagtggtttaatggatgacttaattcaggaattagatcaaaacaaaaaagacttgctacaatttgctgaaaaactagaatttgctgcaaataaattcgaagaaaaagatttagaagaaagcgatgtttttggactatttagttaaagagggtaatttatatgagctcaaaagatgcaaaaaaaagtcaagaagaagctagattataacaattaaagcaagaaatgcgtaatagtactgataatttggttagcaatgctaaaaataatgtagcattaaaatctcaaacattaaatgaaatcattgaaacaattaataattcttcgcaaaatttagaaggtacatttgaaggaaaagcaagcgaagcagcccaacaaagtataaataaactcaaaaacaataatgaaaatcttaaacaaaaatttgagaccctattaaatacaatgaagataaatggataatattgagaaaatattaatttgtctgtacttttttatacattacgtaaatcccctcgctaaacaaatagtgaagggatttatgtttacttataatctatgctgaactaaatatcataattaatactattatataaacattttttgaagtaaaacctgcttacgtcgcttaagatacattattttttcttgctgcaattcaattagtttttcatttctattaaaaaactgccccactttttcttgttcgtgattgcttggcatattcagtgtttgagatttgacaatttctgtatttaaattaacttgactacctggttgaccgtatttactccatttatccttgaaatattcaagccaatagtacataaagaataaattaaacttaggatttaaaaatattaaaaatccatcatgaactcccgttttcacaaaattcattacaggttttccaatacttgccgcaatacttaatagtaaatgtgttgttactaaaacccttgttttttcttgaccttcaattgataatttttgttccaaatgataaattttcccgttttgatttgtaacatcagaaattcttagccatcctatgtctgattctttattaaaccatttaggatctttaataggtctaggagaagcccctcgtacaatttgtgataattcccctaattgcttctcttcccaatctggataatcattaccattctcatctttgaatcgcaattcctgtgagaaaattttctgcatatagccttttttctgttgttgaagtaattcgagtttttgttcttctaattcaatttgtcggtcgagtttgctgaagaattgtcctattttttgttgttcacataattctggaaaatatactcttatattttctattaacccccaatcagcccttggcatcttagaaccagccgatttactagcaacatcagaatatcgttttgtttgtataaaataatatagaaataaattcaataatttatcttctttcgttgatttcaaaacccatatttctgatgaacacactccacttttttttgtaaaataatacttattcaaatatggtctgagctttccatacaaaacattttgtggattgaatttatttttttgacttgaaaattcttttgaattataaattttaattaatcgacccgtattttgttcaatacaatccaattctatatcaatacttgcattctcattttgagggttaaatttttcactcttattcgttgctagatttccaaaaatgtctaaagaatattcgccttcaaaccctgggaacctcaattctggcacatttttcgtttgtgtattactcatctttcaacaccccaagttctttcaggtatgcattgatttcttgttcaatttctgcgatttctttgtcgatatttttcaaatcttgttggacttgatctaaatcaattggtgcttcttcttcgaatgtatcgacatatctcggtatgtttaggttgtaatcgttatcggcgatctcttgtaatgtcccgctgtagctatatttatcaatcgtttctttacgcttatatgtgtctataatacgttcgacttgggcatcgcttaaatggttttgattttttcctttttcaaaatcattggatgcatcgataaataatacgttatcgtcttgttggcgacattttttaaatacaaggatacatgttggaatacttgtcccatagaaaatattggctggcaaaccaatcacggcttctaagtagttcttttcttctattaaatagcgacgaatcacaccttctgcggcaccacggaataatacaccatgtgggagtacgactgccatggtaccttcatcgtctaggtaatgtaccatgtgttgaataaaggcaaagtctgctttggattttggcgcaagcttgccgtaaccactgaatcgttcatcattttcaaattttgaatctgctgtccatttcgcactgtatggtgggttcgcaataaccgcatcaaatgtattgcctaaaaaggctggattttccaatgtgtcatcattacggatctcgaagttctcataacgcacatcatgtaataacatattcatgcgtgctaagttgtatgtagtattgttacgttcttgtccgaaataacgatacacttgcgtttctttaccaacacgtaacagtaatgaacctgaaccacatgttggatcatatacgtgacgtaatttatctttaccgtctgtgacaatcttcgccagtatcttagatacttgttgtggtgtataaaactcgcctgcttttttacccgctgtcgccgcaaagcgcccgataaggaattcgtatgcatcacctaacatatcaatttccatgtcactgtgaacgaatggtaagtcgtcaagattaaccataactttggaaattaacgcagtacgttctttgacattgttacctaaacgtgttgaactcaaatccatatcgctgaacagtccgataaagtcattttcactttcttcacctagtgttgatgtttcaactttacgaattgccgtcgtcaggtgttcgatatcgaaatcttgcgtttcaatttcacgaatcatcgcgctgaataaatcttgtggctcaatgaagtaaccgacttgatcaattaattctgcttttaaatcttcacgatattcttcatctgcccatgcttcttgatacgtaatatcttcacctgccaaggcatctgcatattcttgttcagctttttcagataagaagcgatagaaaatcaagcctaaaatgtaattacggaattcactcgcatccatgttccctcttaaatcattcgcaatcgaccataattttttatgtaattcagcttgttgctgacgttgtttttcagtaatagacatgtgattcctccgcctttgaataagtaatttatctctttgtgtaatagatttattataacatttggttatgttgcgatgttgataatttggatgttggtggtggaaatttttagttttagtggcgcaattgtcattgaaaaattttatagaaatgttgtagctttcaaatgctttcaaaatcatttatattcttaatgatgtcaaaaagttgttcattcatacataaataaaaccaatcaacaattgagttggtgaaaatcaatcgttgattggcattgatgcatattaaataatgcaatatatatatattaataaatgttagttatagcatattttgtcaggattgggtgaatgtctaagttttaattatttatctaaattatctgtaatgaatttcttaatttcaggagagaaataaacagcgaatcctcttgtgctttcacctgatggcttattacctgcatagattacaccaatagcttcgtgtttactatttaatataggtgaaccagagctaccaggctgaataattgcatccgatgtcactatattcccattcactgatagtactttaccagttgattcatacatttgtagtttatttccattaggatttggataaccaatgactgatataggttcattttctttagcttctgatgctatattaaatttactagtgaaatctttgaattttctaccttttggttgtgttgatttttcttcaacttgtacaaccgcaatatcttctttaccaggataatctacaatcttagtaactttataaagtccaccaccgttattataaaaaccattaggatgtgctttgatttcatcaccgactttcatgtgataggtaacatgtttattggtaatgattgtatgatttccaactacaaatcctgttccagcgcccatccatgtaacaccactgtatggtgcaacatttgtatttgtaatttgtttaacagtattttcggctttggctgtttgttgaataccttcaaccattgttgtgccgacaccagttattgatgttaaaatcgtcaatgctgcaatacttttgatgattatatttttattcatttttctgctcctctaagtatttgtattaatataaggttaggtttttgaagttttattttttaaatcatttcgaataaatagaatcacagagatgtttaaaattgttgattttgttgttaatttctaaaaatcatttatcaatgtatggatggatgatttatttatctaaattatctgcaataaatttcttaatttcaggagagaaataaacagcaaatgaccttgtactttcacctgttggtttatcactagcatacataacaccaattgtttctcgcttactatttaatataggtgaaccagagctgccaggttggacaaccgcatcagatgtcactatatttccattcactgatagtactttaccagttgattcatacatttgtagtttatttccattaggatttggataaccaatgactgatataggttcattttctttagcttctgatgctatattaaatttactagtgaaatctttgaattttctaccttttggttgtgttgatttttcttcaacttgtacaaccgcaatatcttcttttccaggataatctacaattttagtaactttatagagtccaccaccgttattataaaaaccattaggatgtgctttgatttcatcaccgactttcatgtgataagtaacatgtttattggtaatgattgtatgatttccaactacaaagcctgttcctgcgcccatccatgtaacaccactgtatggtgcaacattcgtattggtaattaatttcacactattttcggctttagccgtttgttgaataccctcaaccactgttgtgccgacgccagtcactgatgttaaaatcgtcaatgccgcaatacttttgatgattatatttttattcatttttctgctcctctaaatattcgtataaatataaggttaggtttttgaagttttattttttaaatcatttcgaataaatagaatcacagagatgtttaaaattgttgattttgttgttaatttctaaaaatcatttatcaatgtatggatggatgatttattttgctatgttatctgtgatgaatttcttaatttcagtcgttaaatatacgctgtatgactcttttttagaatgaccaatttggtctccactatataaaacgcccacaacttcatttttattgttaaagactggtgaccctgaattgccaccttcagcaaatgcatctgatactaatttatctccattaattgatagtactgttcctgttgattgatacatatgatgtttatttttatatggagctggatatccaacaatagcaattctttcattcgctttaacttctgatgtcagcgttaggatttcagtattttcaccaaactttttattttttgggtaaactgaatcttcttcaacttgaacaatagctaaatctgccgagcctgtatatgggataactttttttactttatagtatccacctgtatcattttcgccattcgggtgggcaagaacagtactgcctacttgaacatctttcgcgacatgtctatttgttaaaatggtatttttacctactacaaaacctgtacctgcacctactcttaatatgcctttgtatggcgaaatactagtattcgttatcttcgtcacattatgttcagctttggctgtttgttgaataccatcaaccactgttgtgccgacgccagtcactgatgttaaaatcgtcaatgccgcaatacttttgatgattatatttttattcatttttctgctcctctgtttattcatgatgcttttgatatagacgtttgctttttatgttatattcgaccgatgtttttcattaaaattattgaacacatgctcatggtgtatatttaaatttgtttaatgttcaatgtgtttttgaataaaatctttgatttgaggcgtaaagtatacggcaccattatattcagaaccaatttttccaataccgccatacaccacacctatgacctcattgttagaatttagaactggtgatcctgaattcccgggttcaatgtatgcatcaaaatttaaaatattgtctttgattctttttatagttcctgtagattcaaactgtttaaaactattttgagcaggtaatgagtaaccaataactttaattttgtcatcaactttagcatctttcgcaaaattgaatgcttggacattttcattaaaattaaagccttttggtccacgttcgactgcttgttcttcaatattcatgacagagatgtcttcatcacccggataatcagaaatgcttttaattttatatataccaccatttcctttgtcaccgtttggatgggcagtaattctatcgccaactttataatcttttgatacatgtttattggtgataattgtattttttccaattacaaaacctgtcgcatctttaaatgaaacgacgccattatatggaaaaatatttgtatctttaacttgcgtaacattcttctctgcatttgctatttgttgtgtctcttcaacgactgcagcatttattccagttactgaggttagaatggctaatgctgccatgcttttaatgactatatttttattcattttcaagctcctttacaattcgagatatgttgcaacgctcgtttaaagtcaatttgtttatttatctatgttttctgcaatgaattttttaatttctggtgtaaagtagacgccatatgcatttctgttatcatcattttttacatcagaagcaaaatgaataccaactaattcgttgttgctgtttaatacaggtgatccagagtttccgctttcagtatgcgctgaatatacaatactgctaccttctactgacatcacagggccagttgactcatataaaacatatttatttttgtatgggtgtggataaccaatcactttaattcgctcaccagctttagcccctgccgcatatttgaatggcgttacattatcattaaaattaaagccttttggtccacgttctattgcacgctcttcaacttgaatgactgatacatcttctttacctggataattaataatctttttaatcgaataaataccaccattacctttatcactatttggatgtgcagtaatacgatcgcccactttgtaatttttcgacacatgtttatttgttaaaatagtattctttccaactacaaatccagttgcacttttaaaagcaactacaccagtatatggaaaaatattagtatcttgaatttttgtgacattattttctgctttggcagtttgttgaacttcctcaaccaatgttgttccaatacctgttacagatgttaaaattgttaatgctgctaaactcttgatgactacgtttttgttcattttaagttcctcttttttaattattttgatatctagatacataattcagtatatttagttaattatgtaaccgttttcttaaccattttttaaaaaatcaacttcacgaatgaattgatgatacttatttttcaatattattttgaataaattcttttaattgtggtgtgaaataaacaccgaaattcttttcagattcatcttttccactacctgcatataaaataccaatcagttcatgtttagaattcaatacaggagatcctgaattacctggttgtgcatacgcatcaaattccataaacgttccactgatatggttaatcgttcctgtcgattcaaacattttatattttgtttgtgcaccctttggataaccaataacagaaattctatctttcgcttttgctccgtctgcaaattttgtataactaacgttcttattaaaattcaaaccttctgtacttgtttcatgaacatgaactatcgcaaggtcttcttttccgggatattctacaatgtctttaacgtcgtagtttcctccgcctttacctttactcgaatgatgtgctgatactctatttttaaaaatatcattacttttagcgatatgtttgttagttacgattgtatttttaccaacaactacaccagtaccacccgcaaatgctaccactgaattgtatggtgccttagttgcatcggtaatttctttgacattcttttctgctttggcaattgaatgaggctgattagaaatattttcagcgaaaccaagagatgttaaaatagttaaagcagttaaacctttaaccattacatttttattcatattttacctccttccaaatttatttttatagttaatgtatctagatacacatttactatatacattttatataaaaatattaattaaatattaattaactacttattaacattttattaaataattatacatgaattgactcatttgtttaaatatgcttaaaactcaatatcacgcaattaaaattgactttttaggattattttggtcttaaatattaattattgaattaaaattgtaatatttattcggaaattaggtaattgaaaatatatggcggaatggtgaacaattcatgtatttaaaatctttcactttattatgtattgtgtttaacaatattattagcgattagttcccctattatttatgacaatatgcagtcaatcaatgaaacatgtatgtatgagtatatttggaactagtaatgtattgttaattattgaagatgattgaattatggaatttttttcgagatatgttatttcggggatcagattttgcgatttcgccttggatagagtagttgcgatttgtaaatacgtttttcaggttcgattcaatttcgttgttaagataatatggattagtttcactgacatgttgatgcatgtcttttttgttctgataaagtataaaatgtttacttaacattacttagtatgacacctgctaattcaaacattatttgagacattcttttcaaattaattataaatttttacctatagactagtttgatatttatctacatctcaaaattctcatcaacaatctttcacatccaacatttttactttagtttttataattcaaaacaacaaaactatgttaaaaaattattctattttttagttaatagatagttaatacatttttgatatttagttaattgttcttttaaaaaaatattattatatttgcattgtaaacgtttacaatataaaaaaaggagcaattaaaatgaatacaaaatttttaggtaaaacattagtagcaagtgctttagtattaacaacattaggaacaggcttacattcttcatacttaggattagatacaaataaagttgttaaaacagctaaagcagaagaaaaaacaaatacagtgatttggcaaggagttaaaaagtcactaatagattcaaatataattagtggcaaccaaggagaaaccgtaaaaatatcttttttactaaataatggacaatccacaagtatagaatctactgcaaatcatgacagttttactaatacttcaaataatttttctaaactcactcaaattgatataaaaaaagaaaacattcctggtgatgattttaatacgactgtagacgcaaataatacatggaaaaacttaacttccagcctagtatctaatggattagcagagaaaggtcaaacagttagtatttacagcaaagatacaagtacagtaattaccgctaaaattggtgaagacttcaatgatcataaaggcttttacttaaataaaagagacatcaataaaatcacaattgaataaaccttaaattcaaatttccttaatttataaaacattaataactaaccctttcttacaaaccacctagcccataatatattaaaacgtcatttttatttcaaatagcggaaaataaaaaaaccattccgcattaactttggcaagttggaatggttaaaaaaatattttagaagccagcgtttggcttgctttgacgacatgttcgcgcatgtcgtcttgtttttacatttatataataacacgcaattcaataaaatgtctaatcaataaacctcaattacattcaaattcaaaaacttttcacctaatattcatcgcttaaataaacattacgtttaattaaccagacattgtcaatcgcgtctaatacccctgctgtccgaaaacaaaattattttgtattcatatttaactgttcactttcctcccttttcaacgcaactaaatttcttttaccgttagcgccccaatctttaatctttaatctttaatctttaattgttctaccgctccatttattgaatcctttaaagagtaaaactgccaatagcaacgtgataataatatagattaccattgtcatcatcactggtatatttccttcaatatacatatatacataacgcgtagcatatgttattggtaaatagaaccacgaatgatctccaagcacttctaatccaaaataaacgttaaatataaacattaaaacgccgacaacaatagccaatacatctttaatgaaaatactaaaaataaaaagtagcagtaatataattacattgaaaaacaatgatacgcctataaacataagtgttattttcatatcatgtgaatgccacaataaattaattgatactaatagaatacatacggctgtaatagtataagtaaaaatcattgatgcaattaaccaatttaacctattagcttttcctaatatatgattaaagtgaccaatattttcttcaaaattgatgacttgatagacgtttatagaaattaatagtgatgtaattgcattaaaactcgctgtaaacaaacttatttgtcgaccattccataaatttacgtttaaataccaatttataaataatataaacaatatggttacaataatgggtacaaatgtgagcgcttgcttagaaaatttcaatttacatgactttaattcgttaattatcattttaatcgccaacttttcttattatttaaaaatgttactatcgcgaaaataatgatgctaacaataatcgaaatatataaggcattgagatcattaaagtattttgaattatggtttacaactaaaccattaggtagtataccaagcgtaataagcgggattctctgcattatcccccacggtaacacccaaaataaactcttcaatgttaaaaacaagacacaaatgactgataatactaagtttattaatattgatacgaacacaccaaagtatcgagttaataaaaagttgagcggtatcaatggtagagatactacatacatcaacaatattgtcaccaataacaacatagcattaaccggatgtggattaataattaggtcacctatataagcaataataaatactaaaaagcaatgtaccaaaaatgctattgataaaatgaaaatctttgctcttatttcttttgtaatcgaccaattattacttaagtaataattaaatgatttatttctcatttcaattttaaataacgaattacaagccatacataatacaatcgggatgaaagcaattggccaaatattaaatagtaaagttatatatggtgacacactattcgctgttcccgtattacttttggcgaataagactgtgaaaatagcaaaacaaagaaataccagcggacttattaataaaacatacatactgaaagaatttttaaatttgataccttctatctttaaatgtatcatttgtaatctcctttcgttattttgaagaatatctcttctaagttttcatctttgttatttctttgctgatattttagctcaccctcatgaataataccgatatgatctgctaaaacttggatttcagataaaatgtgacttgaaataataatactagtaccttgttctgttaataattttagaagttctctaagttcttggattccatatgggtctaaaccattagatggttcgtctaatactaaaatttctggctttttaattaatgccattgcaattccaagtctttgtttcatacctaaagaaaagtccttaacctttttctttttatcgacatttaaattgactaagcttaaaacactattaatttcgctgaaatcaacgctttcatttaaacacacaattttcaaattatcttgtgcacttaaatgattatatgtcgcaggtgtttcaataagcgaaccaactttgtgcaaataatttcgtgtcattggtctattatctaatttaatttcccctgaatcttgttgaagtatgccacatataattttcataagtgtcgttttaccggctccattaataccaagtaatccataaacttcgttattttctaaagtgatattaatatgctttaatacatcttgatttttaaaccgcttcgaaatgttttcagtaactaattttgccataatcaaaaactcctttgatttattaacttgctttttgatttgctacatttaatgctttatacacatcaagctcaccatgcccatatctactaaatggtttattattcttagatgtcccatgctgatataacaattcaatcgctttatctggatgtttttcaagatgatatttatcaatgattaaagctagtgctcccgaaactttaggtgtggctaatgaagttccagcttgataaatatatcttccgttattggcagtagttaaaatgttctccttatgcatatacccttcattcatccatttatccacaccgaattgatttaaataagcaaatgatcctccgggcgcagcaatatctgtataattcataccaaaattggaaaactcagatagattactcttttgatctgtagatcctactgtaacgacattgtccatagatgcaggaacatctttcacttcgccattaccttgatattcacgctgtaattttagtttctgtttgtcattgacatcaataccatcattaccagctgcagcaacaacgatagattttttcttcttggcgtaattgattgctttctgtaacgcatcgtattctactttttcatcttttctaaatgtttgatggtcatttttgtccaaaatagtataactaccaacactaatattaatgacttgatttccatcatttgcagcttgaacaatcgcttttgatacccaaagcagttctgtttttttactaccaaacacgcgatacattgtaaatttgttattcggtgcaacacctattaacttaccattagcactcgtttgacccgacaccatcgtgccatgtcctttcctatcattgacatcgtgaacatcacctgtttcctccggttcagtacctctaaaaccgtttaaaggtactaaatttttagaatcagtcgagaaattatttttcaaatcgtcatggtttttcatcacacctgtatctatgattgctatttttgtgttagcctgttttggcaaatcatcatacgatgcaccattattggttattttattcatatcccattgtcttgaaaataatgactcatttgatgttctgtctattgttttctcgctagtaatacaagttgaacatgtggcattgatatatttaatatcatttttatagtttgctaaagcattagcatgcattttcgtcattttaatctgtgccacatgtaattccggtatattatagacaacgtttaaggacttctttttaactaacttgttaaatgttgctgtatttttgtattcaacactgtaatatagttcttctgacgctgatgcattactcattgtaatagatattaaaagactcaatattattaaactaataatagcgcgctttatgattttcatattctaatctcaaatgaattccagaactttatatggttcaggtgcgacaacattctttttaaatgtttttgacgctaattcataactttctgaaatatttgctggatatattgatacaccataatcttttaataatcgaatattattttgagtaactggattttcccacattcgtaaattcatatttggaaatatagaaagtttttcaaaagctgtatgacaaatagttaataataaattgtcacatataccatttgcaattttattaatcgtattagaagtcgcaggtaaaataataatcttgtcatgtttatttgctatatctacatgatttaaaaaagggtcttcaaattcgtcataatagttatcgcaaaattgctttaatatttcaccattaataaactttctaccgtttgttgacgcgattacatttacttcatcaaattttgattttaattcaataatatagtggctaatattgatactattaactgagccacacaaacaaatcaatacattttctcccatgatatacgcctccattcagctaattaaaaacgcattggtccaatttttttcattgagaatttttgtatttttcagtgtcatcaatgttagatagacccctaattcaccttctaaaaggccaactttcctacttttaaatacatcttgcttattttcattaatgtctataaaattcaccagataatcttccttataatgagaaatcagtttatttattaatacagtgatataatcagacacttcatttaattcaaaattcaaattcataattgttaacattaatatttgtgatgacaatccatgacaaatagttggacttattaaattttcatctttatcatttactacttgtagcatcacttttttagacattttaattatttcatcatcttgtaatgcttggccgattaaaaacaacgtcgtcattacacccgtattgccataacaccaaccattccgaataaaattgaaatgattacgttcagaaattaaatcgtaacgctgcaaccatctttcgtggttacaaaatttttcgtccatgataaatttgtacatgtcttttaatatgtgctgatgattttcaatcgtaattcctttaatcacgcataatgcaaataaagacatcggtcctagcactccatgtgcaaggccaagattgatattaccttcagtaaaataatttttatcagactctaaaaattgactttcttgtgggactacccagctatttttagaatattgaatatctttaaagtatactaatatgctttttaatgctttaacattaaattcattctcatctactctatttagcaaatatctccctatcccagctaatccactgacagtatcataatttaatggatttaatggttcttgtaatatttgatcaaatttattttctatttcatttacaatgtgaccatcaatattatttaaaatattttgataatttttgccattttgcgatgctaaatccattgaaaatgcaatacctgaaagtccaccaaacaaagaattgttatattgaccactctgtaaatatggtgctaatttcatgatgtacttatgcacaatttgctcagtattaatatcgaaaactttttgataagcatctaaaaacaaaatgatacctggtataccatgtgataaagttgaaggttcaaaataatcggtttcagtagatgcttttgaaatgaaatcatctacttctgaaatctcttgaaacttcttcttcaatattagattcatatcaatcatttttgtcaccacaccaatgcttttgagttttaacaatttcttttacaatagataaaacaaatgtttcttgatccttatcaatgccaaatattcgattgcagcgcatatgaattaagctgccaataatccttgaccttttagtagttaaagtttttttaagcccttcatttaatttgctcaaaatttggttgccatcttttaaaattcgataaataccactatagtgtttagccatatattcaaaattattagcaggattacatatagttacaagttcatttttaaaaggtctaatatctttacttttaaatgatgtaggtacatagttattaacaatttccatacgctcttcattagaaattgaaaacatctcaaataaatacattattgaaatagcaacaatatatggtcgatcaaacttaaaatcattttcaataatattgacagctaaattcgtgtcatattcaaagaaggcttctatttcattaatcgtgttctttccaccatatctaaaaaattctggctcgtatgatacaaattcataatctgaaacttctgtcgtttgtcgaacatgtggtaaccaattcttcaagatgctgtatatttctgcgtaattttcgtcattcctgaataacctcaactttaaaatgtcaccttgtttgatataacgcattaaaaaatattgatctatatctcccttatctttaagatgttttacaaatggatacaaattgtcgatgataaatgtatcttgcgatggcttatcgatatgaatatgtaatgcaaaccagtctttgtcatattcaatatctgtatttttatattttggaatttcgatttcgggtccacgataagatgattttttataaattggtgtaacaatttcatacacatgatcattctttgattgaggtaaaaatgattctactaaacgtacacgtttatgcttcttatattctttcatcaataaatatctatgattagctaatgataaatttagtagaagcttgttatctccataaactaaattcacgatattaggtatattgaattgttcttgatatttcaaaaattgttgatcccattcttcatttttaggtaaaggtaataccatctcgttaattttccaatatgctggtttaagaatgacatttttatatctgattcgtggtgaataactaaatgaatcaatactcacatcattcataggttcaatgcatttcacagattccattgaaatttctcgtaacaatcgatataaattacattcttttaaaaagttatacatattgtttgattcaaatagtacccttttatttagttggctagaatataaatataatttgttaaaggtagcaccaacataaatatcatctaaggtaagctcatactttgaataactattactacttcctaaattcaatgaatattcgtatgagtcatgattagttaatacattatgatttctcggatatttcggtatgttatttatagaaatcatttctacattgtcatcacatatcatcttctgataataatgtcctttttcatgttctaattttgctaaagtttcagtatcaattaaatgatgaaatcgcccaaatgtagcgccagcattaaaagacgccgttaaaggactaataacaatgagctcattgtactgattgtaaaaacgtcctaaataaagttcagcataaacatctgcactcattggcgcatgataatgattgatttcattatcgttaatcaatgactctacatctttttcatttatgactatctcatcgttatttctcaaggcatgtaaaaatttttgcttaagcattacaatattatttccatcggtttcttcttcttgaaaaattgttgtcccgaaacctgttatatctgaaatcaaatctttaatattcacgagttgttcaaatccatacttttcaataaaacggttgtgaagaactttcaaatctgtgaatccaatattatttcttgataaaagccacaataagtacgctgcttcagatatatttgttgctatatcttgatgtaaataattgttaatcatgtcaattttggtatcaatttgaagatagtttttacatttgaatagtgccttcatatgatgaataatgtctttatataattcctcgccaaatccaatttcagttttttcataagctaatatcaatttctggatttctctaatttttttcacaaaatcatcattatgtaaagaaagtttatttaaaatataatttaaattatcgctatatgataacggtggtctgattgttgaatatataatttcctttgagacaagattatggatatatactttcactttagtaatatcattaatttcaaattcttgatttatcttttcagctaaatttgaaaaagtaatattattattcgtcacagtggttttgatgaatacgagtaattcgctatttttaatggaaaaagatgtatctttattgttgtttaaataaatagcactttgttcatttaaatatattcgatcattgataatatgtgctttactattccaaataactttcaaattttgataatattcatcaatactctcaatataactaaccagtttatacaaccattcgccatcgactttcacatatttttgaatactatttccaactttaagacgtgttggttcatttacaaaatgccccaaattaataccacttaataatccaaatggagttggacgtgttgacattctaattaaatattttaataaactttctttagcatctctaaccttcttgttatcgccatcaaaatttatttcttgtaaagtacaatataagttaaatgttgttgttaggattgattctttcatctgagcatttaattgtaagtcgctatatttaatttgttcagtatttaaaaataaattgaaaaattcaactgataataaaggtgttctaatcatacaaatacttgacggttcgtaaatagtgttcatttgtaagcacctcacatatttgaatagacaaatagagccctttcaggctctatttgctgtaatcttaacagcagaagctattaaaactaccagtcttagcacaaccaggagtacataaactatgacttgtaatacgttcgtcacctgctgaatcatttgagttattgtttgctttaacttgcacgtctaaatcaagaactttttccatagataaaacctcctattattagttgaagttaaggcctacttcaattgtcatattatcccttttcacacaacaaatcaataaattatataattatattttgtgaattttttgtaaacacttattaatttagtaatactattttgataattagatttttgtgtttttttattactatttattttcactaataattttgcatctaagttcataattttaaatttattgatgaattttttaatagattaatcaattcatttatacaaatacttagatatttttatctatcaatactattacgaatttggagatggctgcttgagattaattaatagatatttatgcagttttgttctatttatacaaaatttagcaaataataattgaagttattttaaagatgaggatataaacatataatttcaatgacttgattattttcttaaatgacatgttctaagagggtcaatataataaccaaagcttgtcattacttatatgtaaagatagaggctaattacataatcctaacttatttaacaggaagtcatgaaaactatattacaactaaaagtataactttccatcaccaaagtcagaatttattgaaacactcaactgataatatagaaggctaattataaaaatacctggcgattaataaactgtttccgttttttagcacttaatatatttaaaaagacaaatagagccctttcaggctctatttgctgtatccttaacaacagaagctgttaaaactacccgtcttttcacaaccaaagctacaaaaaagatggctagttattctttcgtcacccgctgaatcattagtgttgttatttcctttaacttgcacgtctaaatcaagaactttttccaaagataaaaccccctatttaaaagttgaagttaagacccacttcaattgtcatattaatcattaccacacaataaatcaatgaatttaataataattatttgttattaatttgtaaatcgtcattaattttatggtactattgttagtttaaacaaataatgtaacttctttttttaatatgttgtgaatattttttgtttaactcttaaatttcgggtttaacttcctctatttctaacagttatactccaggattagtttctttagaatccgtaccgattaatttaacagtatggttttgccagtcaacttcataagtagatgtaaacgttactgtattttgatttttgtagttattaccaacccagtgtagtcgattccattgattagtatatctatccatttctctttggtaagttactttgattttagatttttttgtatcattttgtttatgagaaagtacgcttataaattctgggttaaagttaccacgcgccaataaaggcatttgatgtgttggcaagaaattttgtccagcatttgaactactttgtctaccacctaaaaacagttcattaccatatgttgggtcataactatctctaccatatggtccccaaccattattcataattttgtgcgcctcaacaccccagccaattgatttatgatttgtttttctatcaatcgtagttctgtaactttcttgtttataatttatcgtttctgaaaatgattttgatccatttaatccacctgataagccattagatatattaatatctccgccataagaataacctaatgtttgttgaacttggaattcttcattttgatttttaggtgcatagtcaacaacatttacagcatcatttgattctgaactaaccgaaacattatacttaccgccccaataaaactgtgagtaattgtaatcttttggattaggctttttataacctgaattaatgtttccggctgccttaagtactaacgtatctttgtcataacttttatccttaatgaaattaaacgttaaaatttgagaaatattcaatttatcattatcagatgttgctgttgttttgtataaagtgattttgtcatctacttttttctcgcttacaggtgtgatatgttgagctgcatcaactgtattcgatagcaaaagcagtgcaattgatgaagcaactgatgatttgactaattttttcattttcatattaattatgtcctttcactttaatttcgtgtgttttccaattaacttcatatctaactacaaagtttctatttacaaatgcattatgctttctttctgcgtaaataccagttctagggaataaagtcgcatatgtaatatctaagtttctaccatatgaaatttcaaattcactcgtatcacttgaacctttttcatgtgatagtgtagtgataaatgatggattaaagccactttgaactaaaggtggcaattgattatcaggagcaaaatattctcttgctgaacctgttggaccatttggactttgtacgaataaatatctatcatgcgcagattttttaccatcaggcgtaacaaattcgtttgctttaacaccccatttaacagattttgagttttgcttgtctacttcactgacataactcttttgggtataactaattgttttagaataattaaatgagccattgccacctatagatggtgctgactggaaattacctccaatgttatatcctaatgtttgaccaacatcagtagtttctattttgtttttaggaaggtaattgattaagctaacatttggatctttagtcgtcagtcctatattatattggaatggccaaatcattcgtttagttaattcatatccactacccttcacatctgaaaatgaagttctggaattaataaaaccttgcattttaacaattaaagcgtctttgttatattttttatcttttacaaagtcgaattgaacattttgagtaacgccccatttcttactacttacatcctccgtacgtttgattacttcagcaccatcaccaatattctctatattagtatttgctctagattcttgaatcggagatgctaaaggtgcaatcagtcctactgacaaagttgcagctaacatttttttcttaaacataagtttcactttctttctatataaatttttaatacaaatttattctagattatttcacttatttataaaattaactgttcattaaaaaataaaatgctataaaatattaaaaatgacacaatttattcatttatgctgctgaaaaccggtcattttggcgcaaccttcattacctttaaatagttccctttatattcgaacaatatgataaaattaccgatactcaatcttttctctgtaaaaataaaaacgaactttaatcaaatcttcaaaaataatgtttgtattatcacaaataatctataattgaatttaaaattaactgattattaactattgtccgttaaacgaagatgattacttcgtatactgttataactgaaatgttctatatatcatttcgtaatatcgcttacttcatctaaaaaaatttaatgctatgatttagtctaattaaaaacatatatatatttactatgaactaaaatttcactttaaaaataaaaaaccatgatttcgaagtcttcataaactgaagcttctactctcatggcaatttatactatgatattcaattataatgcctagtctcatagtaaacggctactacattcgcatgtacttcgttttactgtccacgcatggtcgttgacttatttatattataatataaatattttatttttcaatacttaattttaaaaatcccctatgaaaatgttgatgagctacatctttaaatcttattatacattgtataaaattatattgcgaggtagtaaattgatattatacacttttggttgtgtatgcatctcacctatcttttttgcttttttcaaataagaaagtattaaaaattaatgcctatacaggaacagacatggctaaacttgatttaaatagtcttgacgacgagcacgtaaaattattaataaatgaattaaaatatccagaaactcatatcgatgtaaatgaattaaaaacaatagttgctagtcgaataaatgaaaggcaagaaataataagttttaagttaggaataaagtacttattaacaataaaaagagggaacatagaaaaagataggttttcaatttcaatcattttcaaagatacctatcacaccctagttagaatagatattaacggtggtactcacgataatccagatggaacaatcgctccgaaaagtcatattcacatatataatgataagtatgataaaaaggataggtttgcttatgaaattaacttgaaagatttccccgacatctataacttgtataatgtgtatatgtcgtttttagagtataataatataaaagaccttgaataaaggagggataatatgactacatttgatgctaaaaaattaaaaaaagaatatcttgattggtataatcagaccttagagttttctaatttatcaaacaatgtagtaagaatagatactccttttaaagataattctttagataatttaataatttacgctttatacgatcagtccagagacatgattacactgacagatgacggctatactatatttgatttagaaaataatggtatttctttaaataaatcaaaaaaacgtaaaaagatttttgaagagcacctttcagcttacggtattaaatataacgataaaactcacgaaatttttgttcaaactaactttaaaaattttaataaatcgaaacataatttattacagtgccttatatttgttaatgatatgtacttactttctaatcctaagtcacagaacatatttacagaagatgttgcaaacaaattggatgaacataacatttattatggaagagatttacctattataggaagcagtggtgttgttcataatttcgacttttttattagcgctaagaaaaatcaaaaagaaaaatttatcaatgctatttctaatcctaataattctatgattattaagtcgaaaataacggatgctatgcaagcaaaaaaaataaaaagacacaggcaaaatgagtttatttttattttaaatgactcaaaaaaagaaataaatgaacataataaaaatcttcttcatgaaaactatattagtacaatagattatagcgaattagatgaaaagataggtttattgatttaatatttatagacgtgataatatcaatgtttatattaaatgaaacgaatttgaaaaattcgaaacagcttaagatagcaaattgaatagccttattgataatgcagaatcgtctacacatagctaaacaaattatttgagaataattattgttaaactatgtggataggcgattttattttgacaagagaaagaagatcatttagttcatagtttaagttacaaatggctaaactttatgaaaatggtatgactagaatcgaaattatactcgaatacgatttaacactctcaatcttctcgaactgaataaatactgggtcattcaatcatcaagataacttaataagtgatgataaatgttcataccattttgcaaatataaccagatactctcaacaaaatgtagagttcaaaaatgatatatcttccaaagaccgcaaactgtagcagaacatgagaaccttgcgattttgaaatggtctaataaatcaaatatcattgaaacattaatcacataaattaacagtagtcccctgttcgcagttctataaattacaaatgcaataaaggctaaagtaaactaattactttagcctttattaataatttagtcgaatttattaaaaatcgactaactcctggttatgctacgcttttctttaaaatccgcacgtagatgccgattgattatattataatattattattttattttttcaagcgtatatataatatttaattttctttaagtaacaactaaacattacatttcaaaacgattaggtcatgcagatgtgcatacaacgcttaaaacatattcgcatttgattaaagaatttgaagaaaatgaaactaaatttatagaaaaaaaactgaatgatttgttttgtgactaaacttcaaaatcttgtgactaaaattaagattaatcatcaaaaattagtcacattgtggctaaaaaattttaaatggatataaataaataagaagtgtaaaaatgaggataatagctcaaatgcagatatatcaagggtttgagtctaaattaaaaatagcgcttaaaatgggtaaaaccaatttaagcgcctttacggaaggtaagggattcgaacccttgagacgcttgtgacgcctacacactttccaggcgtgctccttcggccagctcggacaaccttcctcaacaataaatatgtaataaaaaaacagaagcgatatttcacttctgtttgtatgactcctacgggactcgaacccgtgttaccgccgtgaaagggcggtgtcttaaccgcttgaccaaggagccatggctccacaggtaggactcgaacctacgaccgatcggttaacagccgatagctctaccactgagctactgtggaataatagaaaataatggagcgggtgatgggaatcgaacccacaacatcagcttggaaggctgaggttttgccattaaactacacccgctaatgtaaacgattatggggcggctgaaggggatcgaaccctcgaatgtcggaaccacaatccgatgtgttaaccacttcaccacaaccgccatgaattaagaatggttcaggacagagtcgaactgccgacacatggagcttcaatccattgctctaccaactgagctactgaaccgtaatggtaataataatggcggtctcgacgggaatcgaacccgcgatctcctgcgtgacaggcaggcgtgttaaccgctacactacgagacctattaaattaaaaactatgtattgcgggaggcggatttgaaccaccgaccttcgggttatgagcccgacgagctaccgaactgctccatcccgcgctaatattattttgaattacctaattaatataccataatcaaaaacctaaagtcaagaactttttgaatttaatttaaatgttatctcttaaataattacttaaatatcgtagcaacatgttctctgttgaacacaaatattagtatattcatttttgtagtatacgtcaacgacatttttaaagttttttgtgtaaaaaaacgcttcttattcccttttatcatataagtgtctaatagttgtcataaatagtgttaaagcattttaaaaggtataggaattataaagtttataacgcctataccttctgaaaaagaaattataaaagcttgttacaccgcatattctttcagtcagcgactaccaatataacattgtagccctaagacattgcttgacgcctcaattaccacaatttttttaaaatcagcagctacctactgacacaacataacacaacaatacattacctatcgtgtcatgtaatcttgcatccgatcttgcaacgctgtaaatgtttcgaagccatcctcttctaagaagtgccctccatcttccacgattcgcaagttcccctctaatgcattcattaaacgctgggtctctttatatgaaacgtatttgtcatttttagaactcaatccataaaaattgtcaactttctttttaatattatcgtaatcaatggttacattacttaaatcaatatctaaatctatattttctgcatcttctttaaagcccgctatactaaaaaagccttcaatcggctgatcaatcatttcaatatattttaaagctgtgattgaacctaaaccatgtgttacaaaatatgtatcctttttgcgtacattaatttgtttcgtcatagcttcaatccactgatccactgtcttcgcttcaggggattcaaaattaaataatgttacgtcatatccttctaaagttaagttatgctccaaccactgataccaatgatttctactatttccatgcatagaatgtacaataattacatctgtcatctcattctctcctttcaacttactacttcttttctatttttaaaaaaatgactgattacctataattgtaaaataaaaacaccttaattagaaatgttatatcgcaaagtgacatttctaattaaagtgtattgtcatcatttcaatatcattcaaaaacagctaaacctttgtctctgcttcaatttcacaaaaataattcccgctgaaagtatctatatttacacactacttctaccatcatataacttaaaatgactatatttcatcaaacattatctaaaggcgtcgcacctacaccacaccatccaacaattaacttacaactctgcgattacttcttcagcagcaactttaccttgcgtaatacaatcaggtagtccaaccgcttcaaaagatgcaccagttactctaagtcgtggatatgtttgtttaatatgtgcttgaatctgtctaatttgttgaatatgaccgacatggtactgtggcatacttttcggcaaacgattgacaattgtaaattcaggatcacctttaaatgtcatcatttgacttaaatctctacgtacaatcgatactaattcattatctgtatgatcatcaaccacagtatcacctggtttacctacatacgcacgaatcaaaaccttaccttctggtgtagtaaatggccattttttcgatgtccaagtacatgcggtaatgtctgtatcacttgttctcgcaatcacgaagccagtaccatcataagtattttcaatgtctttttcatcaaatgccaatacaacagttgcaacagtcgtactatccatcgttttaaagtaatcaaatgctggatcttgcccgaaccaattcaaaaagacttgatgtggtgttgtcactaatattccatcgaatacatcttcttgttgattactgtagacaattttatattgcttttgagatgtaataatatcatccactgacgtattgtagcgtattgtcacacctttatttttaacatcttgttctaatgcttcaataaatgagcttaaaccatgcttaaattgtttgaattgtccttttggtgcgccaggatataattgtctttgtttcagacgcttatttttctcatccttcataccttttatcagacttccgaatgcctcttctttttctttaaaattaggaaacgtactcatcaaacttaatttatcaatatcggtaccataaataccacccattaaaggctctattaaattctcaagtacctcattacctaatcttgctctgaaaaatgcaccaacagaaatgtcaccattctgcatttgagtaggtttttttaataaatcaaaccctgctcttaactttccaaatggtgaaattaatttagttgtcacaaacggtttgatatctgtcggaattcccataattgatccacctggaataggatacaatttgtttttcgcaaaaatataagattgtccagtcgtatttgtaacaatatcttgttctaatccaatatctttcgctaattctgtcatgatcgtttttctacctaaataagattcaggccctagttcaatcatataaccatctttacgatacgattgaatctttccccccggacgattcgatgcttcaaagatggttacatcaatattaggatcttgctgttttaaaaaatatgcacttgataaacctgttatccccgctcctataatagccactgatttagtcacaacgtttcacgcttctttcgtcattaaaatatagacttgatttcatcaacaattgcaccgataaataatggatgtgtattcggcatttttggacgataataattcgcaccaatatcatcgcaaacaactttacattcataatcattgtcataaagcacctctaaatgctcacatacaaaacctactggcgtatatataaagtttttatactgatgtttttcatataaatcacgtgttaaatcttgtacatctggccctaaccaaggtgtacctgtattaccttcagattgccaaccaatcgcgatatgttcaatattagattgttctttaattaaaagcgcagtatgttctagttcttgtggatatggatcattattcttttcgattaaaccttttggcaaactatgtgccgaaacaactaataccgtgtctttatgttcctcttccggtatttgagctaatgtttcgttgactttattcgtccaatattcaataaatttaggttgttcataataatgtttcacatgtgtaagttgaataccatattttgcagcttcttcatcagcacgtttgtcatatgatcctactgaaaatgaagaataatgtggtgctagtactacagtgattgcttcagtaataccatcattgtgcatttgttcaaccgcatcttcgataaatggtgaaatgtgttttaatcctaagtatagtttaaattcaacatctgcatatgctttatttaatgctgaagctagcgcatcagcttggtcatctgttgtacctgctaatggtgataaaccacctataaattcatatctatctttcaaatcttgaagttcttcttcagatggacgtttaccatgtctaatatctgtataatatggctctatgtcactttctttataaggtgtgccataagccataactaataatcccatttttttagtcattgataataccttcctttaaatgaattatctttcatgtgcttcaatgtaatactatgattatctttgtgtatatgtgtgtacgaattcgcttactttacgtaacgtctctggttgcacttctgggaatacaccgtgtcctaaattaaagatgtgtttaccgttctccataccttgatctaatattggtttcaatctctcttcaatgacattccatggtgctaataaaattgatggatctaaattcccttgtaatgttttagtaacgcctaattgttgagcctgattaatagacgttctccaatctaggcctaatacatcaatcggtaaatcattccattcattgattaaatgactggcacctacaccgaataaaattaccggcacatcatgtttttctttaacctcactgattaatcgaatcatatgtggtttaatgtaacgtctgtaatcctcgacatttaatgcacctacccatgaatcgaaaatttgaatcaattcggcacctgcttcgacttgtgctgttacatatttaacagatacatcaactaaatgattcattaaagcaaaccatgttgcttcatctctatacatcatcgcttttgtaaaattgtaatttttcgatggtccgccttcaatcatatatgacgctaatgtaaatggtgccccagtaaatcctattagcggcacatttaacttttcttctgttaaaagtttaattgtatctaatacatatggtacatctcgttcggggtctatttgagaaagtttctcaacatcttgaattgttttgattggattatgaatcactggaccaatacccgatttaatttctacatcgacaccaattggctttaatggtgtcataatatctttgtataaaattgctgcatctgtatgataattatcaactggtaaatgtgttacataagcgcacaactccggctgatgtgtaatatcgaatagtgaatatttttctttcaattttcgatattctggttgcgaacggccagcttgtcgcataaaccaaacaggtgtatgtgatgtttcttcacctttgatcatttttaaaattgtattgtttttattatgcaccataaaggcctcctaaattaaaatcattcttatctatattatcatatcgctcattcgttcgtattttcaataaataaatgtcataaaactgacatttaatcatagaactatttattgtaaattcaaattctaaagtccattattttgtatcattacttctaaatatctcgcaagattcattatagtaattttaatcaattattaatagtggtaatgactagtttatcatcgtataataaataaaaacataagggggacctttcatatgaagaaactatatacatcttatggcacttatggatttttacatcaaataaaaatcaataacccgacccatcaactattccaattttcagcatcagatacttcagttatttttgaagaaactgatggtgagactgttttaaaatcacctacaaaatatgatgttatcaaagaaattggtgaattcagtgaacatcatttctattgtgcaatcttcattccatcaacagaagatcatgcatatcaacttgaaaagaaactgattagtgtagacgataatttcagaaactttggtggctttaaaagctatcgtttgttaagacctgctaaaggtacaacatacaaaatttattttggatttgctgatcgacatgcatacgaagactttaagcaatctgatgcctttaatgaccatttttcaaaagacgcattaagtcattactttggttcaagcggacaacattcaagttattttgaaagatatctatacccaataaaagaatagattcgaagaaaacttccattggttatgctgttaacgtatagatgctaatgtaatctgaacgccgtatcatttggcgttcaacattacatgcacctttacaacatacatgccaatggaagttttttagtctcgtaataatgtttcctgatatttcaactttttaataatacttctaatcgttaataaacctacaatatagaaaatgagtacaacatagaataacgtcatatgttttataataaatgtcactgcaaacacagtacaaataacaaacattaatctatataaaaactgttcataccctttgattaccttctcttcaggtacaggccacacttgaggccataagccatatgcttgctgtgaataaaattgtgccatttgtaacaatataatatatacaaataaacacccaataattgctgtcactaatggatatgataaccaaaccattaataaaactgcaataattactaacctaaagataatattaaatgcgtctctccctcttataaagcttctaataaataagaataaatacatcgcattagagttaaatttactaccctttggaactggtaaaagtatatctagataacttcttctgactgcagattctttcaaatgttttacatcggtgaacatattaacaaatttataataattcatatgatgtcgatgttcgattgcaatcattttctcccaaggatacaaaaagcctggtttatattttttaactaaaaattctattaacacaggcaaagcaaccatcacaaatgcgatgtaccattttggagctaatagtaagtaatatgttagagcaaaggtgatgaatgatattaaattaacttgccatgttttaagtcccgattgataccattgccatcttaagcgtaaaccaacatatggaaaaattaatgcactgactccaaaacaaatataaaatgccacattatgttgattaatattgtaaaacaacgggaacattacaataacaataatgagttggattaatatgcgcgcaaagtaactatataaaatcgcatgacgcataaattgagacatgtgtttttcaaatggtaataaaaagattttatccgcttcttttaggagtggtcgcattggaaaaatggatgtcaatgctacaatcactgctgctattaatgaaaaattgatattcgttggaatatgttttaaccattcaccatatccaaaaataaatgcacccagcaaaataagtaaaaagaccatgaaatgaccattaaatataaacttattataataatttttctctttacgaagggcatgtaatcttttattaaataatgtggtcgcttggttatgcatgtacatctccaccttgcgtcacatgaatatatatatcgtctaatgtttgtttatgtaagccagtttgttgtctcaatgcttctaaatctccaaatgcaacggcttcaccttcgtctagtatgataaaacgatcacaataacgttcagctgttgctaaaatatgtgtactcattagaacggttctaccttcgtttttcttttcaaccattaaatctaacatggattgaattcctaatggatctaggccaaggaatggttcgtctataatatacaattcgggattaacgataaacgcacaaataatcatgactttttgtttcatccccttagaaaaatgactcggaaaaactttcaattcattttctaaacggaatgtctttaataatggcattgctcgattcatcgcttcatcacgatcaatatcatatgccattgctgtcatctcaatgtgttcctctaatgtgagttcttcataaataaccggtgattccggaatataagataactttcttctataagcctctatgtcatcattaatgttgatatctgaaattgatagagatccttccataggtgtaagcaatcctagcatatgtttaatcgttgtactcttaccagcgccattaaggccaataagtccaacgatttcgcctttgtttaattcaaaatttatatctttaattacagggcgttttccatatccacctgtaagctgttctactttaactgtcataaggcacctccatgacttatattgtaccaaaaattataaaatgctcatattaaatacacatgtcctaatatcgaatttttagcgacaatgttataatgaatggtaatacaagttgaaaaggagtgtagtcatcatgtcagaaacaattttcggcaaaattttaactggagaaattcctagctttaaagtatatgaagacgattatgtctatgcctttttagatatatcacaagttactaaaggacatacgttattaattcctaaaaaagcttctgctaatatctttgaaactgatgaagaaacaatgaaacatatcggtgcagcattacctaaagtagcaaatgctattaagcgtgcatttaatcctgatggtttaaacattattcaaaataatggtgagtttgcagatcaatctgtatttcatattcatttccacttaattcctcgatatgaaaatgatattgatggatttggttataagtgggaaacacatgaagacattttagataacgatgcaaaacaacaaattgctgaacaaattcaagcacaattttaaatgtatgcttaatctaagctcgaacgggtataatatgattaatattataacaattgcgtttgaagtgataacatcaaggttagcaattttaaacaaaatgagttatcaagataacagatgttaaaagtgaggagaatataaatgaaagcatcacgcattctattcggtatcggtgttggcgtagcagctggttttgtagttgcacttcaaggacgagacgacaaaagtgtcaagaacaacacgatcgatcgtactgcccctactggttcaaaatcagaactacaacgtgaatttgaaacgattaaacaaagttttaatgacattttaaactatggtgttcaaattaaaaacgaaagtgcggaatttggtagttcaattggtggtgaaattaagtcattacttggaaacttcaaatctgacattaatcctaatattgaacgtttacagtcacacatcgaaaatttacaaaatcgtggcgaggatattggaaacgaaatttctaagtagcacgttacgttctcgatcacaactattattattagtaacagcatatttattttttttaattaaatgccaaataaacgagatgacattagaaattagatatttcttgtcatctcttttttataactcaaatgaacttatgtttacaaattacaggaatacatcgtttgtagtgattttcgcttaaatcatatttatgaattgattgaaaaaattgcttaggattcattgtgttatccttgcactttgattacgctttacttaaatcattatcgacaaacaacatacttatattttcattgagccgaaccttttatgcacattacatataccttacttgcacaaattattaatctggtatttattataattacatatcactatatttttagcatttgtataacttagttggtcaaaagatgcttttgcatatgccctgccatatccattttttatattattcaagttttcaaatactcatgtcacacgcgcctttttcataagtgatgctttattagcaagaagatgtgttcgcagaaatttgttctgcattctacttctacgctagtcaatcagccaattttaccaaactccactttcgcgtttcaaatcaaacaatacttcgcccctttcttcttatataacaattcttctaacatgatatgttactattgaattactgaacctgagttagttataatctaacttatattgaaaagagatgaggcgtaagatatgtttttatgtaaaagacaaattgatatcaatgcacgatttggtttgcctagaattgcatttatgagtgcagttgcaaccatcattatgtttttagttagttatgaagtaatgtattttttatctaatacgccattatcagatagacattttctcatctttttattacttgtatttatgacgtatccattacataaaagtatacatttgttatttttcttaccatatagaaaatcgtttaaagttcataagttgactaaaagaaaatggcttatattctataatacctacgtcaatcaacctgtacacaaattttatttttgcattaacttaatattgccgttaattatcttatctgcaatgttcgtttatctaacaattttattcccgcaatatggacattattttatgttcttattggcattgaatttcggtatttccattacagatttattatatttaaaaataattatattttctaattatggacaatatatagaagaacatagtacaggtattaatattttgaaaaaaattaaaaatccatatcatttataacaaaataattatagcaaggtgttattatttgtttttaggctatgtaatagcttacaatcaaatgtatatagaccttgtttttttattttcatcaatttctacccctaaacctaatgctctagtctgatgtcatgggttattgattggtgataatataaaactatgttatattcacgatgattaacttacaaaggagtttcaactatgaagatgataaacaaattaatcgttccggtaacagctagtgctttattattaggcgcttgtggcgctagtgccacagactctaaagaaaatacattaatttcttctaaagctggagacgtaacagttgcagatacaatgaaaaaaatcggtaaagatcaaattgcaaatgcatcatttactgaaatgttaaataaaattttagctgataaatataaaaataaagttaatgataagaagattgacgaacaaattgaaaaaatgcaaaagcaatacggcggtaaagataaatttgaaaaggcccttcaacagcaaggtttaacagccgataaatataaagaaaatttacgtactgctgcttatcataaagaattactatcagataaaattaaaatctctgattctgaaattaaagaagacagcaagaaagcttcacatattttaattaaagttaaatctaagaaaagcgacaaagaaggcttagatgataaagaagcgaaacaaaaagctgaagaaattcaaaaagaagtttcaaaagatccaagtaaatttggtgaaatcgctaaaaaagaatcaatggatactggttcagctaaaaaagatggcgaattaggttatgttcttaaaggacaaactgataaagattttgaaaaagcactatttaagcttaaagatggtgaagtatcagaggttgttaaatcaagctttggatatcatattattaaagctgataaaccaacagactttaacagtgaaaaacaaagcctgaaagaaaaattagtcgatcagaaagtacaaaaaaatccaaaattattaactgatgcatacaaagatctattaaaagaatacgatgttgactttaaagatcgtgatattaaatcagttgtcgaagataaaatcttaaaccctgaaaaacttaaacaaggtggcgcacaaggcggacaatccggcatgagccaataacacaaaaccgagcgaccgtggttcaaaaatcataccacggccgctcggttttttcgcattaaaaatcggacagatgagctcatgtttcagtatactcatctgtccgatatcttttaattcttaatcgagtgattcaggattgtagaatctacgattttcaagaccaaatattttatctgtaaactgacccttgtcagtttttttatatgccttttcaaacatattcattctagcatcgatattatcgatatagcataaaatttctgcttcttttaagtatggcagttttggcgaaccatactctaacttaccatgatgagataaaatcatatgtcttaacaacatgatttcttctccttcaatgttcaattcacgagctgcttcaactacttcatcactcgcaatcgagatgtgtcctaataagttaccttcgactgtatacgacgtcgcaacaggaccactcaattctctaactttaccaatatcatgcaaaataataccactatataacaaacttttgtttaacaatggataaatgtcacaaattgattttgcaatacgtaacatcgttaatacatgatagcttaagccactcgcaaagttatgatgatgagaactagcagctggatatgtgtaaaatcgttcttgatattttttcaataaatgacgtgtgatacgttgtaaattagcattttcaatatctagcaaataatgagaaatctcttcttgtatttctgccggtgataaaggtgcaccatctacaaattgttctgtttttaattgatcttcagttgtcgctagtctaatttggttgactttcatctgtttatttccgcgatagtttatgatgtcacctttaacatgtacaatttcttcaggcttgattgttgccatatcattttttgtagccgtccaaaatttcgcttcaatttcaccacttttatcttgcaaatgtaatgtcatataatctttaccttgtgctgttacaccctgtgtagctttatgcactaagaaaaagtgatcaactgaatctccgggatttagattctctatatttctcatcgtttcccgccttcctctattttgtttaatgtaatcacttcttttgatggaacaatattatcttttacacatgtaaagtatagtacttgatagtgttctgataatgatcgtaaataattcaacattttttcagtacgctttttatcaaaatgaacaaatgcatcatcaacaattaatgggaacggataatatggtcttagtaccttaattaaactgatacgtaaagctacataaagtaattcttttgtagattgacttagttcaacaggatcatataattgaccattaacatgtttaaccgtaattgaatcttcattatagttaatcatcgtatatctgccatctgttaaatgcttcaatatttctaccgcttcattaataacttgaggcaaacgtttatctttaatttgtttaatgtgttcatcaactaaactttgtaaataacttaaacttgcccaatcttttgcgatatcattaagttgatttttaagactgtgatattcatgtcttaaattagcaagcgttgtatcagtttccatgtgattgatttgtgcacttaaatcactgacttgtgcttgcatttcaagatattgctcattatattcgtcaacttgagtagccaataaatgatcttcttcttcaagttgtgcagttgttttttcacttaaactagaacttaattcataagaatagttttggttctcaagatatttagttaaatcattaaaacgactcaaattactagtataagtttggtaatcttcatgatgttggtaaaaatcttcttcagtaccaacattgataaaatcgaatagtgctgtaatttctttattattttcttctaattgagcatttaaatgatttaattcatttgtaacaagtttggtattttcagcattaatacgccatttttcattcgtgtcttcagctgatttcaaccattgttgcacatcgtggaataaagataatttgttgaaataaacaaattgtgattttgtaacagcttcagcatgattgtagaatgtatctaattcttgaaccaattgctggcgttgttgatttaaatcactgatatgttgatctaatgctttaatattcgccattgtagaaatactatcaacaattaaatcatttgaaattttagatgataagtataattcatccttaacgttttcaactgtcgattgtaattcatcatgacgccctttcgcatcatttaaacgaccttcaatatactgacgtttctcttctaaaatatctttatttttcaatgcctgttgccagtgatcacgaatgcgatattgctcatcaagatcaaaatctaagtcatagttttcatctaaaatggctagttgtgctttaatttcttcgatttcatctgtgatggcctcgctataatctacttcttttgatttagacatgatgataccgataacaaatactaaagttaatactgcgaaaataataccaaacagcatgttgtttgaaataaatgagaaggcagttaaaccaatacctactaatgttaaaagaataaacgttgttcgtaacaatttttgacgtttttgtttttcttgttgctcaatttcgaaacgttctttcaatttgctatacaagttctctttttcgtttaattcaatgacttgttgtgagtattcttttttcttttcaaaagtctcttcaggaactattttttcttcaacagaatctagttcgctatgaaccgcattatcttcgattttattttcttctaaactacgttctaattgtttaatgtgtgcagcttgttcttgtttattcttgatttgctcactgacataacttttcattgcctctgaactatctacgtcatgatgcgtttcagaccaaccaatatttgcttgcaattcatctttatcacgttgtttattcgcaatatccttttcgattgcagtaagttcaaattctttatttttaatttcattttcttgttgattcaaactaataaaggcgtcaatatcagattgcttaactggctctaattgagtcgcttcttctttaagttgagctaaacgctcatttcttaaaccaatatctctttctaacgattgcttatgcgctcgtgctttttcgtaacgatccacacctttttctgggaatgtgattggctcaatatttaactgttgttctagagacttccattcttgtgaatgatcatgtaaagcaacctctttttgtttttcttcatgcatttttgataattgatttaaattatgctttaaattctctaatcgacgtgatgatttatcacgatcatctactaagcgatgatatgtttctagcttagcttcttcttcacgaatttgactttctagttgttttaattgctcaatttgttgattaatgatcggatttttacctgattttttatataattcatcttttttacgattaatcacttcgcgcattgacgtgaattcagttgatcctaaagcccctgcttgtaataaataatcttgcaattgtttttcatttagatttctatgaatgtcttgaagccctagtacatcaaatgaaaagataccttgatatgtctttttagaaatataattaagtttcttttgtaaccaagcatcatcacgcacagcaccattaggtaaatatactttcacatcaccttgagcactgcctttaattcgttcaacttcaatctctaagccatcatcaagaataagtactaatttaccaccgtattggttacctagacgtggttctagtcttggctctttagactttttagttggaaaaccaaataatatcgaatggatgaatgcttgaatcgtcgatttacccgcttcattttcaccaaaaatttcagtgaagtttttattaaattcaattttacgttgaacaaattgaccgtaaccataaatttcaagtgatttaattatcattttgttcacctctcatttcagcttttaatatttcttcagcacgattaactaatgctgtatggtcgaatgttccataatcgtctaggaactttgatgcccttggatttaaatataaatctgacatcgctttatcaaaaacagtttgatcgactaataattccgctgaaaattcattaactaaaggtgactcatcattttgtgcatattgtatttttaactcatcaatatatacaaattgattttcgttttcttcataatctgtaatcatttcttcaacttgtaataaatcttgaggtgaaattaatgtctcactattaataacaagcgttaaacgataaaaggcttttccttcttctctcacttgttctttaaagttttgaatgacctcgtataaaccttgcttagatgtcttatccgtttcaatagttgcttcttcaaatctaatatactgtgtaggataaaatttagtctttaattttaagtggtcaccctcgattaataagcaacctttttcaccttgctcattaaaatgtctaccttgaatattacctgaatagttaattacaggcatatctcttaattgttgacgttcatgtatatgacctaaagcccaataatgatacaatttactgtttaaatcttctaaaatgaactcggtatatctttcgttaactgaagatttactatacgtaccatgcaagacaccaatatgtatgcctttttggccttgacttgatggatattcatcaatcttgttctcataacttgctctattttcataactaaatccgtgaatataaattgtttcaccagatttagtaattgcttcatacgtctcaactttatttgaaaatacagaaacattatctggccagtttgatgaaatctttgatgataatgggtcgtgattaccatgacaaacataaacaaagatttgttcattttgtaaacgttcaaattgctgttttaagaaaatttcagcacgtaatgttctgttttcactatcaaataaatcacccgcgataattacaaaatcaacatcttgttgtaatgcaatatctacaatatttttaaaactttcataagcacttttttgaacatcctcaaaaattttagggcttatatgactcttagatttgaaaggactatctaaatgtaaatccgaacaatgaataaatttaaccatacatccatatctccttaattaaaggttctaacatcaattttgcaaaatccaactatacaaagcattctaatcactataatcatacttataggtgtagtgattcattagctgatttattaaaaccagtcgccatttttatttcgttaaaaaactattatctacacaataataaagtgctttagtcaaatcgtgatgttttatttattaacaagtttattatttcttcattttaccataatacgcttcatatcgtcgatgaacatatgaaattgagacacatttataacagtttaaaattttatttgtagcgtacgttgatatttttcaaaaacttcagtcggaaatgcaatttccgtagttattaacaccgctagtgaaccaactgacacattaaagatttacatgattactctactagatttgctcggcagtaatgaccaattagaaactaaatgtcaaaactatcattgcacttaatacgccaaacattttcaggccgttcttaatgagtcattaaaagtgaaacgcttttccatcagtccgatacatgaccgaactaatagtattatgttgaaaactttacacatcaaaatgcaaaaaggaagttaggacacgtttactagcctaacttccgttatcaagctcatctgcccgttttggcatagagctagccatgtttgattgcccagcttccgtcgtccattctgagctaaagctaggacatgtttagtagcctaaattccgatactgaacgcatctgcccaatttgacagagagcctctaacttctgttatcaaaactaaaaaaactacccacaaagtctcggactctgtcggcagtctattcctctatttaaaggattgaaaaatattattttaatattagtcagcgtaaatttcgtctaatggtttaacgataatttggttgatttcttggaatacttgactcattttttgttcagcattcattaatgcagagatgttttcatctttttcaattgcttgcgcttgttcttgcgctttttgtaaatcttcttcagcaatttcttcaccttgcatttgtttttgttggaagttaatttgagtttcacggaactcgtcgaataactttttagattcttcgttagcttttacattagcgaatgcttctttgattgctttgtattcttcgctttctcttaaagcttgttctaattgatttgcataatcatataaatttactgccatggttatagcactcctttgttgtgatgtttattaaaacgttcgatattactttaccacatctcgcttttttagacaaagattgcaaccaaaccttggaaaaatccaataataccacctaaaatgaaacctaatgacataatcaactttagttctttgttagcaatttctataattaatttttcaatataatctaagtcaaacgtattaatttgttcttcaattaatcctcgtaaatccacttttttcataattgtagataagtggatcgataatttttcaatgattaaatttgctaatttgctagagagttgaccttctaaataatcaacgaattgaggcattaacgtaaccactggcttattcgcttgtttgcttgcatatgttgttacatacactgatagattttcagcgatttcattaaactgcgatgcatctaacagttcattcaatggtttatctttaaaagtttgatattcattggtaattaacgatgtcacaattgttcttgctttaggatgagatgttaaacgtataagttcttgttgaatgcgatctgcaatgctctcttttgtcataaacatttgcaacataccaattaacttacctttctcattgaaaaaagtatccaacatatcattaatatcttgtgtgccttttgcagatgataaataattccttgcacgatcacataataagtctgttgcgttatctacatgctgatctaaaaatgttacaagttgatttggcaataaagatgctattgtttggttttgatgctttgtataataattattcaattgtgattcaatatattgatttccattagtttgcaatacttgttctaaatcaatatcgatttgagaagtaatttgttttattgacaattgatctttcgtcaacttttgtaactgctgttgaatcatagattctattgcttgctgtgattgctcgctttttaatttttcattaattaaagtttctgtaagcaaatgctcttcaatcacttggccaattttagttgcaatttcttcgcgtcttttcggtattaaacctggtgtaaatgggactctaaatttaaatatatagtatggtttaaaggggtgaaacagcattctaattgcaattacattagtaatgcccccaattatcgcccctactacaatcataaatatgataataaatagtgcattcataattttgactcctttgtgacaacatagttattcattataccactatttttattttttaattcattaatcatttcactttctgctcaatttattattagtttacatacaaaaagcgatgcctcacctctcgaaacaggtgtgttacatcgcttttattatttattaaaagtatataggcctagatatgtactaattcttctttagcatttctgttaaagtatgtttcagcttctctcattttagaagtaccgaaaattggttggttatctggatttaatacacgataaatattgcttactttgttactttgtaaaatgtacccattacgagtctcaatgttattccaataaatatcacttgttggtgcatggtttggataagcacagtgatttcttgaaattgtttgaacgatttctaatggatcacagccaaatgtactgtttaatacttcagagtctctgaataatgcacaaattgaaatacaagttgtccagtttggtaatactctctctttttcgatttgtactaaagtctttttagaaagtccaattgtttgcgccatagtatcttgcgtataaccagcctctatacgaaccattttaaattttgtttgaattaaatctgtaaaactctgtctatccattctgttatctacctttctgtttggggaattttatccggacacaagaaattgcaataatacacatttcttgaaacacagattacatcttaatatatttttaataaaatgaaaagagtcaatttcacatttgtattaaattttgatcaagtcaacaagagttaagtttactttataatgaagcgaaagtaaatgaagtgaaattttatgcataatcactagatttgataaaacttacacttttataatgatatcaaatttacaaagaaaactgtataataaaccctatcgctataaaaaattcatcaaaatcagattaaaaattgtctatttttcgacaaatatttaaaagctcattctaaatcaacttattttccattgcataaattgctgcttgtgtacgatcgctaacttgtaatttactaaatatatgactgacatgtgttttaattgttttttcagatacaaataaagtttctgcaatctctttatttgttttacctttaaccatttcacgtaacacttcaatttctctctttgacaacttattcgtgtagtgtggtttttggctaactgtttcgaatacatcttgtgccttaggatgtatcattttttcaccgttcataactcgtctaatagtttcaattaattgctgaggctcaacgtctttcatttcataaccatcagcacctttattgattgctgaaattacatgttcatcatcaacataacttgttaataccaaaactttaatatccggataatgtgccttaatatattccgtaatttcaataccattcatgccaggcatcactaaatctaatagcacaatatcagggtgctcatgctcttttaaatattctaaaaatgtttctccatctgcaaagtcttgtaaaacttctatgttttcaatcgtggataataaaaatcgcaatccttgtcgcacaatataatggtcatctactaatattactttgttcatgggttatctccttaaatcaagctattttataggaattgtgaattgtatttgtgtaccctttgttggctgagaatgaaaggtcactttacctcttaataatttaactctttgttttatgttattaataccgtgtgatgaagctatctgaacattatcgatctcaaatccttgaccataatcaatcacgtcaatatatagtatatcgttcatttgttttaatgtaagatccattttattcgtatcagcatgtttcttaacattattaatacactcttgtaatgctctatatatgttttcttcgatttcattagataaatcgattaaaccttctacatttacatttaattgtatatgcattaatttactatatgctgtcaaagcatgaattaaaccttgctcaagtccaactggcttaagttgccaaatcaatgcacgcatttcattaacggcattttgactcgtttcctcaatcgtcttgaatgcttgtttagcgatggattcgcttgacatgccatacgcagcatgtgctgttagttttacagaaaataacatttgatttactgaatcatgtaaatctctagctaaacgattacgttcattaatttttgctgcttctttttcacggtctgttaaataaatacgtttgatggctgaccctaattgaaatgcgacagactctagcaactctaaatcttcatcactatatatttcagtatttggggacgctacatttaaaatgccgaattgttcttgacccgatttaagtggtaccgttgcatgatgtgtaatattgtcattttggctaggaaatgctttagaggctaagttaatacgagaacaattgacgatattcgacgctttcattagcctacgttgattaaatgctttcacacaccaacaagacccatctttaatatagtgacagtggtctgctgtcaaagattgtggtagagccacatgtgatacaagttcatgttcacctacgctattgatgaaaaatatccagcctgtcgtgaaattactgccctcaattaaatattttaacgcaccttgggtcatgctatacatttcagtttcttcgtttaaaaattcggcaatcttttttaataaagctagtcgcgtcctttgttccatcaaatcgctccaattcatttttacgtgtattaactattatacattgagttattatatttttaaatcttagacgtgaacatgataaaatggccttgattactcaatagttatatttaggagaactgatttgtgatatgatattaaagactataggaggattttatgaaatttaaaataccagaaaactttaatgacttaagtttacgagatattttccaacaacttaaggtacctaaaaaagatttacatcatttaaatatgtctaaagatattactattaatgataaacctgcgcgattaatggataaagtgcatactggcgacgatgtatttgttccaaccatcgatgaaaaaagtaattatgttccaagttatcgttatgcacaaattaaatacgaagacgatgatatggcaatcgtaatgaaacctaaaggtgttaagactcaccctaatgatttaaaagaaagcaatactttaatgaatcatgtgatttacactattgatagtgactatgtcgaaccaattcatcgactggaccaggaaacagtaggattattaattgttgctaaaaatcctttaatgaaaaaaattcttgatcgcatgttagaagacaatgatattacgcggatatacaaagcaaatgttaaggcacttttacctttaaaaccacaaacgattgatatgccaattggtaaagataaattccattcgaataaacgacgtgtgtctcctactggacagcgtgcaattacacacattttaacttcaaaaatgataaaagaagctgtgtgccaacttgaaatcaagttggatactggacgtactcatcaaattcgtgtgcatttagctgaaattggtcaccctgttattggtgatcctttatatggtgattcaacgttaagacaattagaacttgaaagttacaaaatagagtttgtgcatcccttgactaaggaagtcatttccgtttctttggatgactaatttgattagttttgcatgatatttaaacatgcaataccgcattgtaactaaatcaagtatcaacttaaatcggatagatggaaaattattaattttttcagatgttcggtttttttgttttttacgatgcttaggattttatattttgatattttaataattattcattttataacatccttggataatgacttgtagtctttttcaactgcgttacgtgtatctatggacaatacatgacatcataagatttttatcacaggttatttggccaatacatgtacaacaattcatcatataaaaaataggttctataataaaacggactccatgaaaagtttttccttttcatggctctatatcaaatcggacttataagttcaatttgacatagacaaaaaataaagcttgaacactatatctacctgtaatgcccaaactttattttatattaatatttaattaatgaggatctaccatatcttctggtttaatccatgcttcaaattgttcttctgtaacatatccagtttgaattgcagattcttttaaagttaaaccttctttatgggctttcttagcaatttgagcagctttttcataaccaatatgtggatttaatgcagtaactaacattaatgattgatttaaataattatcaatattctcttcgattggttcaatgcccactgcacaattgttattaaatgtttccataccgtcagctaaaaggtaaattgattgtagtgtattatgcataataactggtttataaacattcaattcaaagttaccttgtgaacttgcgaagccaacaactgtatcattacccattacttggactgcaaccattgttaacatttcacattgtgtaggattaactttaccaggcataattgatgaacctggttcattttcagggatagaaatttctgccaaaccagctcgtggccctgaagccaaccatctcacatcattagcaattttcattaagtctcctgctagcgccttcaatgttccatgtagttgtactacttcatcatgtgctgttaatgcatggaatttattttcagaagatacaaatggataacccgtattttctgaaatataatgtgccactttatcaccaaattcaggatgcgcattaataccagtaccaacagccgtaccaccgatggcaagatttaaaatgtgcttcttagattcagataacattatttcgcaacggtcaagcatataacgccagccactaatctcttgtcctagtttgatcggcgttgcatcttgtaaatgtgtacgaccaattttaataattgaatcaaatttgtcttctttttctttcaaagtatttcttaaaagttttaatgcaggttctaattttgtttcaacctcttgatataatgcaacgtgcatagcagttgggaatgtatcattcgaactttgtgatttatttacatcatcatttgggtggatactttcatcactttgatgatcttttaaatacatattagcaacataacttactacttcgttcacattcatattactttgtgtaccgcttcctgtttgccatacaactagtgggaagtgttcatctaattcacctgataaaatttgatcacatgcgtatacaatggcatctttttttgcctcgcttaattttcctaaatcaaaattagctaatgctgctgcacgctttagttgtgcaaaaccataaactacttcgattggcatacgctctttaccaactgggaaattacgtttacttctttctgtttgagcaccccaatatttatctgcaggtacttctatttctccaaaagtatcatgttcaattcttactgacattcaatttctccccttatcactgtttatttaactgtagtatatcattaaataatttaattgagcaatttatgattaaaacgttttcataatttgaaataaaaatacactaatctcacgtgttcaccctttattacagtgatacggtcatacgattagtgtgttatctatcattatttagttattgttgaactaagtttaattacgatactttgttttagtagcttcaaccgtagcaatagctgtaagtatatataatacagcactaacaattgtcgtatatggatttagagcaacaagcgtacctaatactcctgttaaactcgcataaaacccatcaagtgtataatacaatattcctgttattaataaacaacaaattacacttattacaatacctgattgattacttttaatgaatgtttgcgcattaacatcatcgattaatccttttgataaattgagttgtaattttattactttgaaaataacaggtaaatataatgccccaattgccaatggaaaagctttaattgatattaaacttataataactgttgctatcaataattgaatccagtattttcctaacataaatatataaatctcctctaatttcattcttcaatagcatatcataatcttggcatattaagaaacgcggtttaatgatttcattaaaaatattactgatagatgacttctttcaattatgtctggagtaattaattatcaattccgtttaaatggtgttttaatatttaaaattgaatttttgatatattactatgtctggtacacaaatcaatgttttatgctttacaaagttatattggcagtagttgactgcagtccacaaacatagaagctggtggaaagtcagcttacaataacatgcaagttggcggggccacaacatagaaaaattggatcctcaatttctacagatattgcaagttagcgaaacgggccacaaactcagaaactggtggaaagtcagcttaaaataacatgcaagttggcgaggccccaaaatagtgagatcggatttctaatttctacagacattgcaaattagggaaacgggccacaaactcagaagttggtggaaagtcagcttacaataacatgcaagttggcggggccacaacatagaaaaattggatcctcaatttctacaaacaatgtaagttggggaaaagggccacaaactcagaagctggcggaaagttagcttaaaataacatgcaagttggcgaggccccaaaatagtgagatcggatttctaatttctacagacattgcaaattagggaaacgggccacaaactcagaagttggtggaaagtcagcttacaataacatgcaagttggcggggccacaacatagaaaaattggatcctcaatttctacaaacaatgtaagttggggaaacagccccaacactgaaactggcagaaagtcagcttctatgaatataataaaaaagctaggtaacaaaatgctacctaacttcatattcaagataatcaatcctatttgatatatgttctatactatacattgtttacatgataaatagctgaatattacacaattataatactttactgactgtcttcttcagaatttttttcttgatcattttgatcagaaatttgttccatttctttacctaattcttttaaatcttcaaaatccgttaccatactgttttcttcttcatgataatttaattttggatctttgtctttagacataatcaatacctcacagatttttaattaagcaaagcgtgacgtaaagtaagctttaacatcttcaggtaaacctgcagccgcttctttatcaagaataacatttaccattctatgtgcttttaaatcggctggttcgaagcttgttttaccattttcttgatataatttttcaactacatctcgtttattagcacctgtcactactaagaaaatttctcttgcttccattagtccttgacgaatactaacatttaacttaccttgctcatcgatagaaacaacttgtaatgttaatttccctttattttctttagttttaatcttatcagcgattaattcgattgcatctttttcataagcaattggataaacttgacctgctggtacacctaacgcttcgaaatatgattttttatcgtcataatctaaaatatttatttggctaaaatcaacagcatgtttttcaacatttttctttaattcatttagaactggcgcttgatctgtatctaaatgaaaacctgcaattgtagtaggattattgttaaattgctttctaataatatcagcagcatattctgctacaagttgactattgtcaaagactttaaagttcattgccatgatttctacactcctcttagtttgcattttacataaaaacggcgatattaataattattataccctaactttgactatatcaaaccatttaactgtaacatgttcatagtttaaatatagcacttaacatctcttttttataatgaaaatagacgaattttaattcaatcctggaaaatcttgttgacgtaacgcttcataaattaacaacgcagcagtatttgataaatttaatgaacgaatatgttcactcataggaattcttaacgctgtgtcttgatatttctctttcacccagtctggtaatcctgtcgtttcttttccaaaaatgaagtaaaaatctttgtcatgatttgaaaaatcaaaatcactataagtctttttaccaaattttgttaataagtaatactcgccatttgtggcttcaaaaaatgcttcaatactatcatgatacgtaatattcacaaattcccaataatctaaaccggctctttttaacattttatcatcagttctaaatccaagaggtttaattaaatgtaaatgtgtgtttgtacctgcacacgtacgtgcaatgttaccagtattagctgggatttctggttgatataaaacgatatgatttgtcatattactattctctccttgtgtctaatccttttatcatttcattctgaacttctgcatcctcttgatcataattagcattgataaaatctcttgcttcttccccaagaatttgaccaatggcccaataagcagttgctcgaatcatcggtctttcatctgttgttgcaacttttttcaattctggaattgcatccacttcattaaaatgcgctaatgctaaaatagcatttcgttgtatcggctttttaccacgccaagcacctgcaaggtgaccatatgtttgtttgaattctttattagacatacgtagtaaaggtactaatcttggctttaaaatttctggttccaaaataatgtcatcttgttcggtattaatacctctatttttcggacaaacttgttgacacgtatcgcaaccatataatctattcccaattttataacgatattggtcaggcatatagccttttgtttgcgttaaaaaactaatgcatttctgactatttaattggccatttccaactaatgcacttgttggacaacgatcaacacaaattgtacaatcaccacagctatctaataatggatcatcaggttcaaaaggtatactgactaacatttcaccgaggtatgtccatgttcctagtttaggattgatgacaaagccattacgaccaacaaatcctaaacctgcacgttctgctactgccctatctgataatacacccgtatctaccatagattttatttcaacatctggaactttagattcaataaatgaagctaacatgtctaatcgtttacgcataattgtatgataatcttgaccccacgatgctctagcaaataagcctctgcgatcacctctaacactcttaggtgcacctttcagtttgttaggataaccaactgcaattgctatgattgaccttgctgttggtaaggataatttaggctccgttcgtaaagcaatatcagattcttcaaatcctgaggcataaccatttgcatgatatgcttctagcttttgcttcaattcatcaaagggatcggcagtagtaaatccaatactgtcgataccaattgtatatgcatagtcaatgatatcttgctttaactgctttgtatccaatcgtatgccccccattaaataatactatgttattttaacacaaccattattcatattgacgtttcatttcacataattttaataataaaaagcttgaatacatgatataactttgtggtgcgcatcatatattcaagcttcgttaggttgttataatactcttgctaagaaattttgtgttctttcatgttgcggttgttcaaatatttcgactggtgtgcctgactctacgacaacgccatctgccataaatatgactttgtcacttacatctttggcaaatcccatttcatgtgtcacaaccaccatggtcataccttctttggctaggtctttcattacttttaatacatcaccaactacctcaggatctaatgctgaagttggttcatcgaataaaataacatctggatgcattgctaaagctcttgcaattgctaccctttgcttttgaccacctgataattgattcggatatacatctgctttttcttttaatcccactttatctaataacgacaatgcttccttatgtaattcatcgttattatctttctttaataatttaggagctaaaataatattatcgacaacttttttatgtggaaataggttgaagttttgaaataccatacccattttttgacgtagtttatctacttgtgtccctttttccgttaagtcattgccttcaaaaatcacttgacctttagtgggtacttctaataaattcatacatcttaacaatgtacttttaccactaccagatggacctattattgctactacttccccttgattgatttcaagattgatatcttttaaaacttcattatctccaaaaactttattaagattgtttattttaatcactggcattcaatctcccttcaatcatgttcataatgcgtgtaagtacaaatgttaagacaaagtataatgctgctgccactattaatggtgtgaatgggtcaaatgaaataccttgaaccacttgtgcattaaacataatttcgccaactccaattgttgacacaatagatgattctttaattaaagtgacaaattcattacctaaagctggtaaaatatttttaattgcttgtggcataattacacttttcatcgtttgtctataattcaaacctagactacgtgcggcttccatttggcctttatcaacagcatttatacctgcacgaataatttcagcaatgtaagctgaggaattaataactaatgcaattgttccacaaacaagagctgaaatgtctagtcctaatgcagcagttataccaaagaatacgataaatacttgaactaacattggtgttcctcttaatatttcgatatagatagaagcaatccatgaaataatttttattttacttaatttcattaacgcaacgaatgcacctaaaatagaacctaatgcaacaccgataagtgaaattaatattgtaatcttaattcctttcaagaaaaaactaccatacttagaaataaaaccactgtcatcattcatcgcatttgcagcattagtcatatatttatcgattaatcctttatctttaacctctttaatcgttttattaatttgtgacaataattttggtgaatcttttggcactgctatcactgtatctttttcttcttcattaaatttcacattggaaattcctaatttaggattttgttttaaatatgcttctgctacaggtttttcaactacagcaccttcaacctttccacttttaagtgctaatataacgtctggtaaacggcttaatgaagtaatagatgcattttcaatttcggtttgagcgattttttcttgttcagttcccttttgtgcccctacttttttattattaaagtctttgatatctttatattcattaactttatctttctttacaagcatgatatttttagtcatcatatatgaatctgaaaaatcaacttgcttcttacgttcaggcgttgaagtcattccggaaataataatatcaatttttccagttttaagagctcctaacaaactatcaaatgacatattgacgatttttaattttaaattattatctttcgcaatttttttagctaaatcaatatctacacctgcatactcagtcttaccattaactgtatgctcaaattccattggtgcataatctgcagaaagacccactctaagttcaccgcgttctttaatcttctcccatgtttgatcttgttcagcatgtgctgtgggattgatatacaccatagcactgctaattaacaaccctaatactaatataaacctaattaaacacttcatttatacagccctccctaatcaatattcataattatacatattaatacattttgatgcaatagtgttttataaatgtatttttattaatataaagaaaagcttctttttaaaagactgtacataaaaaatccgctattatacgtgaacaaatctcacattttaaaatcaatcaaaaaagcgctactatcaatatcttattgacagtaacgcctatatttatcatatattaaaacttattcttgtcatcaagctataaattattgttttggaacttcaaatttataaatatcattagaatatataggaatgaattttttacacaattcatgaacaataaatgccgatacaaatggtatgacaaaataaccaagtgctaataaaataatattcattgttggatcacctgacattcggttaaatgcatttattgggccaactaatcctgtatatccaaatccagcagacaatggtgttcctttaacctgaagaacgtaagcaatgattccagtaattattccatttatagtcaatggtatcgaaataattaaatttttcaagtaaactgggatcatcatttttgcagctcctatgagtaaaactgcatttacaccaatagaattgacacgcaatgagccaaataagaaagtaacacaggcagccactatacctaggtttgctgctccacttcctagtccgtttaaactaatcgcagttgcaatcgctactaacgatattggtgttaccattaataatgaaaatgccacactaataagtatagacattaacaacggatttaagtctgtaaaagaatgaattacatttccaattgcttgagtaatttttcgaatgtaaggtaatgtgattagaccgatacccccactaacgataggtactaaaactggtaatataattaattcaaaagatccaagtttgttttgtaataccatatatataagacatgcaataataacaaccaaactcgtatttataatgtcacctataccttttaacataaaactattattactatatacaacagcacctgaaccaatcatagctgatgtacctactatagcagcacctgcgccattaaatttaaattgatgagcagctaaaaccccaataataaatgccataaatgattgaattagtatcactaactgatacgttaattctaaaatttcattaccacttttaaatatttttaatacttcacctaatagagcattcggaacaagtgcaataacaacaccagcaccaatagaatttaaaatcttactgaaaaactgtttattatcagcattatttgcgttactcataaacgacctccaatttgaacattaaactcatcatattatagaaaattaactttaacaatgattagttggctaatttaatctaaatataacaatccacaaaatgaataaagtaaatttaaacaatctactcactaatcaatgtcatgctaatcttaaaatactactaattacatcctgtgactaataatgtaataaattgtaaatattaaaatagccatattactattaagatagataaattgaatcgacttggtataaagcacaataaaatagcacttttacaaatatattattagaaaagttgaaacaaatatataaccccagataatataatcattatcattaatgtaataccaaaaaaagaagttaaacaatgcatagttgcttaacttccaatattgaactcatcattacaatttgacatagagtctattaaagcgtgtgccatttgagtccacttttatttgtattgtatagagagaaataaaaagaaaccttgttttacaaggtttctaatacgttatgttatgtaaataacagttaattataccggtggtcggggtcgaaccgacactccacaagtggaacgggattttgagtcccgcgcgtctgccaattccgccacaccggcttaatggtaaacaaaaaacttccctttggaagcaattatggagcggaagataggatttacacctatacctcgttccgggaaggaacgtgttctaaaagttgaactactcccgcaaatattaaattatggagcggaagataggatttacacctatacctcattccaggaaggaatgtattctaagagttgaaatactcccgcattattattaaattatggagcggaagataggatttgcacctatacctcgttccgggaaggaacgtgttctaaaagttgaactactcccgcataaacctggaggcggcaaccggatttgaaccggtgataaaggttttgcagacctctgccttaccacttggctatgccgccaataactgggctagctggattcgaaccaacgagtgacggagtcaaagtccgttgccttaccgcttggctatagcccattaataataagggcggctgaaggggatcgaaccctcgaatgtcggaaccacaatccgatgtgttaaccacttcaccacagccgccatggcaggggcagtaggaatcgaacccacaccaaaggttttggagacctctattctaccgttgaactatgcccctattaaaaataataaatggaggagggcagattcgaactgccgaacccgaaggagcggatttacagtccgccgcgtttagccacttcgctacccctccataaatggtgccggccagaggacttgaacccccaacctactgattacaagtcagttgctctaccaattgagctaggccggcaaagaaatggttcaggacagagtcgaactgccgacacatggagcttcaatccattgctctaccaactgagctactgaaccataataaaaatgtaatgatggcggtctcgacgggaatcgaacccgcgatctcctgcgtgacaggcaggcgtgttaaccgctacactacgagacctataaaatattgcgggaggcggatttgaaccaccgaccttcgggttatgagcccgacgagctaccgaactgctccatcccgcgataataaaaaataatggcggaggaagagggattcgaacccccgcggcccgttaaggccctgtcggttttcaagaccgatcccttcagccggacttgggtattcctccattattataggtaaatcgctattaattataaaattaaatggcggtctcgacgggaatcgaacccgcgatctcctgcgtgacaggcaggcgtgttaaccgctacactacgagaccattagtaaaacggaggaagagggattcgaacccccgcgagccgttaagcccctgtcggttttcaagaccgatcccttcagccggacttgggtattcctccaaaattatatggaccttgcaggactcgaacctgcgaccgaacggttatgagccgttagctctaaccaactgagctaaaggtcctaaatataattttacaactaataaatagtggcggtggaggggatcgaacccccgacctcacgggtatgaaccgtacgctctagccagctgagctacaccgccttatatagtttgtaaataatatggtggagactagcgggatcgaaccgctgacctcctgcgtgcaaagcaggcgctctcccagctgagctaagcccccataataattacagtatatcgggaagacaggattcgaacctgcgaccccttggtcccaaaccaagtgctctaccaagctgagctacttcccgtataattaacgcgcccgataggagtcgaacccataacctcttgatccgtagtcaaacgctctatccaattgagctacgggcgcatatgtttttattgaaaatggtgccgaggaccggaatcgaaccggtacggtgatcactcaccgcaggattttaagtcctgtgcgtctgccagttccgccaccccggcactataaaaatggagcagaagacgggattcgaacccgcgaccccaaccttggcaaggttgtattctaccgctgaactacttctgcatatgcgggtgaagggagtcgaacccccacgccgtaaggcgctagatcctaagtctagtgcgtctgccaattccgccacacccgcaaatggtgagccatagaggattcgaacctctgaccctctgattaaaagtcagatgctctaccaactgagctaatggctcttccatggtgccggccagaggacttgaacccccaacctactgattacaagtcagttgctctaccaattgagctaggccggcaatatgtaagaataaatggtggagaatgacgggttcgaaccgccgaccctctgcttgtaaggcagatgctctcccagctgagctaattctccgatttaaaactgcctggcaacgttctactctagcggaacgtaagttcgactaccatcgacgctaaggagcttaacttctgtgttcggcatgggaacaggtgtgacctccttgctatagtcaccagacatatgaatgtaatttatacattcaaaactagatagtaagtaaaagtgattttgcttcgcaaaacatttattttgattaagtcttcgatcgattagtattcgtcagctccacatgtcaccatgcttccacctcgaacctattaacctcatcatctttgagggatcttataaccgaagttgggaaatctcatcttgaggggggcttcatgcttagatgctttcagcacttatcccgtccacacatagctacccagctatgccgttggcacgacaactggtacaccagaggtatgtccatcccggtcctctcgtactaaggacagctcctctcaaatttcctacgcccacgacggatagggaccgaactgtctcacgacgttctgaacccagctcgcgtaccgctttaatgggcgaacagcccaacccttgggaccgactacagccccaggatgcgatgagccgacatcgaggtgccaaacctccccgtcgatgtgaactcttgggggagataagcctgttatccccggggtagcttttatccgttgagcgatggcccttccatgcggaaccaccggatcactaagtccgtctttcgaccctgctcgacttgtaggtctcgcagtcaagctcccttatgcctttacactctatgaatgatttccaaccattctgagggaacctttgagcgcctccgttaccttttaggaggcgaccgccccagtcaaactgcccgcctgacactgtctcccaccacgataagtggtgcgggttagaaagccaacacagctagggtagtatcccaccagcgcctccacgtaagctagcgctcacgtttcaaaggctcctacctatcctgtacaagctgtgccgaatttcaatatcaggctacagtaaagctccacggggtctttccgtcctgtcgcgggtaacctgcatcttcacaggtactatgatttcaccgagtctctcgttgagacagtgcccaaatcgttacgcctttcgtgcgggtcggaacttacccgacaaggaatttcgctaccttaggaccgttatagttacggccgccgtttactggggcttcgattcgtagcttcgcagaagctaaccactcctcttaaccttccagcaccgggcaggcgtcagcccctatacatcaccttacggtttagcagagacctgtgtttttgataaacagtcgcttgggcctattcactgcggctcttctgggcgttaaccctaaagagcaccccttctcccgaagttacggggtcattttgccgagttccttaacgagagttcgctcgctcaccttagaattctcatcttgactacctgtgtcggtttgcggtacgggcacctattttctatctagaggcttttctcggcagtgtgaaatcaacgactcgaagacacaatgtcttctccccatcacagctcagccttaacgagtaccggatttgcctaatactcagccttactgcttagacgtgcaatccaatcgcacgcttcgcctatcctactgcgtccccccatcgattaaaacgattataggtggtacaggaatatcaacctgttatccatcgcctacgcctgtcggcctcagcttaggacccgactaacccagagcggacgagccttcctctggaaaccttagtcaatcggtggacgggattctcacccgtctttcgctactcacaccggcattctcacttctaagcgctccacatgtccttacgatcatgcttcaacgcccttagaacgctctcctaccattgtccaaaggacaatccacagcttcggtaatatgtttagccccggtacattttcggcgcagtgtcactcgactagtgagctattacgcactctttaaatgatggctgcttctaagccaacatcctagttgtctgggcaacgccacatccttttccacttaacatatattttgggaccttagctggtggtctgggctgtttccctttcgaacacggaccttatcacccatgttctgactcccaagttaaattaattggcattcggagtttgtctgaattcggtaacccgagaggggcccctcgtccaaacagtgctctacctccaataatcatcacttgaggctagccctaaagctatttcggagagaaccagctatctccaggttcgattggaatttctccgctaccctcagttcatccgctcacttttcaacgtaagtcggttcggtcctccattcagtgttacctgaacttcaacctgaccaagggtagatcacctggtttcgggtctacgaccaaatactaaacgccctattcagactcgctttcgctacggctccacatttactgcttaaccttgcatcaaatcgtaactcgccggttcattctacaaaaggcacgccatcacccattaacgggctctgactacttgtaagcacacggtttcaggttctatttcactccccttccggggtgcttttcacctttccctcacggtactggttcactatcggtcactagagagtatttagccttaggagatggtcctcccagattccgacggaatttcacgtgctccgtcgtactcaggatccactcaagagagacaacattttcgactacaggattattaccttctttgattcatctttccagatgattcgtctaatgtcgtcctttgtaactccgtatagagtgtcctacaaccccaacaagcaagcttgttggtttgggctcttcccgtttcgctcgccgctactaagggaatcgaattttctttctcttcctccgggtactaagatgtttcagttctccgggtgtgccttctgatatgctatgtattcacatatcgataacatgacataactcatgctgggtttccccattcggaaatctctggatcaaagcttacttacagctccccaaagcatatcgtcgttagtaacgtccttcatcggcttctagtgccaaggcatccaccgtgcgcccttaataacttaatctatgtttccaccatttttataagtcaaacgttaacatgaagttacgttcttttataaaaagatttaaacgcgttattaatcttgtgagtgttctttcgaacactagcgattatttcttatgaattcaagcttatttaaaactctttattcactcggttttgcttggtaaaatctatattttacttacttatctagttttcaatgtacaaataatggtggagactagcgggatcgaaccgctgacctcctgcgtgcaaagcaggcgctctcccagctgagctaagcccccaaataggtattaaattaatggtgggcctaagtggactcgaaccaccgacctcacgcttatcaggcgtgcgctctaaccagctgagctataggcccattaatttgaatgaacaaacattcaaaactgaatacaatatgtcacgttattccgcatcttctgaagaagatgttccgaatatatccttagaaaggaggtgatccagccgcaccttccgatacggctaccttgttacgacttcaccccaatcatttgtcccaccttcgacggctagctcctaaaaggttactccaccggcttcgggtgttacaaactctcgtggtgtgacgggcggtgtgtacaagacccgggaacgtattcaccgtagcatgctgatctacgattactagcgattccagcttcatgtagtcgagttgcagactacaatccgaactgagaacaactttatgggatttgcttgacctcgcggtttcgctgccctttgtattgtccattgtagcacgtgtgtagcccaaatcataaggggcatgatgatttgacgtcatccccaccttcctccggtttgtcaccggcagtcaacttagagtgcccaacttaatgatggcaactaagcttaagggttgcgctcgttgcgggacttaacccaacatctcacgacacgagctgacgacaaccatgcaccacctgtcactttgtcccccgaaggggaaagctctatctctagagttgtcaaaggatgtcaagatttggtaaggttcttcgcgttgcttcgaattaaaccacatgctccaccgcttgtgcgggtccccgtcaattcctttgagtttcaaccttgcggtcgtactccccaggcggagtgcttaatgcgttagctgcagcactaaggggcggaaaccccctaacacttagcactcatcgtttacggcgtggactaccagggtatctaatcctgtttgatccccacgctttcgcacatcagcgtcagttacagaccagaaagtcgccttcgccactggtgttcctccatatctctgcgcatttcaccgctacacatggaattccactttcctcttctgcactcaagttttccagtttccaatgaccctccacggttgagccgtgggctttcacatcagacttaaaaaaccgcctacgcgcgctttacgcccaataattccggataacgcttgccacctacgtattaccgcggctgctggcacgtagttagccgtggctttctgattaggtaccgtcaagatgtgcacagttacttacacatatgttcttccctaataacagagttttacgatccgaagaccttcatcactcacgcggcgttgctccgtcaggctttcgcccattgcggaagattccctactgctgcctcccgtaggagtctggaccgtgtctcagttccagtgtggccgatcaccctctcaggtcggctatgcatcgttgccttggtaagccgttaccttaccaactagctaatgcagcgcggatccatctataagtgacagcaagaccgtctttcacttttgaaccatgcggttcaaaatattatccggtattagctccggtttcccgaagttatcccagtcttataggtaggttatccacgtgttactcacccgtccgccgctaacatcagagaagcaagcttctcgtccgttcgctcgacttgcatgtattaggcacgccgccagcgttcatcctgagccaggatcaaactctccataaaaattatgatgtttgattagctcataaatactaaataatgtttgtaacttatagttacgtttttggaattaacgttgacatattgtcattcagttttcaatgttcgtttgtcacttacaagatttaattataactcgtaagtttttgtaagtcaagaattatttttaattattttatttctaaaaaataaatttcctaactcaattaattcaacaaatattattttattatgtatttgttcgaatttcaatagtcaaatttacactttattaatattttaaatcaacaacttaaaacatttgttttttaaatattagtgccgtttgacgacttttatataatatcaagttattctagtagagtcaacataaaacaacacttatttttgtttaaaaattactgttgaagggattattttctattcgtaagtactatatgtatttaaagtgtaattccttatgctttttacttcagttttacaaacaaacttatactcactttatggatagttatttagtagaccttcgtttgaatatttttatgtttatttataaaggatactagttattagttaataccacttccgtagttagaatattcttttcttcaatttaaatatttttcagaataagcataaaaaagaagttaaacaactttcatgtcgtttaacttcttaaatattacacttacttatatgaagtaagctaacgcttttttaatttgtcatactaccaaagttaaattatttatcttggcattctttacaaactccataaatttccattcgatgatgtgttacgtcaaagtcagtcatatgctgagctaatctttcaatttcatttaactgtggatattgaaaatcaacaatcttaccacattgttcacatataatatgataatgattatgtgtattaaagtcgaatcgacttgatgagtctccatatgttaattcttttacaattccaatatctttaaacactcttaagttattatatattgtcgcaacacttatatttggaaaatcaggtgaaagtgcttgataaatttcatcagctgttggatgagtatgtgaagaaattaaataacgtaatattgcttgtctttgaggtgtaattcttacgcctgcttgtcgcaatgatgcaattgattcttctagttcatgttcaattgattctatttcaacactcatctatatcaccatctttcttatataataataattattacttactataaatataactgtagtattgcgcgcgtgtcaatatttacatgatgatttcatttaatagccttttttagtatccacttcattctcaattagaccattcttattgagaaaattaactagattgtttttaaaaatatctaataagtcatactttgcttcataatcattaccagttatatgtgctgttatggttacattttccaattcatataattcatgattaggtttcaaaggttcattttcaaacacatctaaatatgcatgtcgaataactttactttttaatacttctattaagaccgcttctttaactatgctacctcgtcctatatttataaaaagtgcttcatctttcattaattcaaaatgttttttctttagtaaatgaatcgtttcttgcgtttctggtaaagcatttataataatgtcagcatttggtaatgtgctttcaagtgattcgatagtatatatctcgtcaaactcatctttgttctgacctgacttgctcagaccaattaaattcatattaaaagcctttgctaacttcgcagttctagtagcaattgcacctgtacctaaaaataaaactgtttgtcctgataggcgtttaccagttattttcgaatcatatatatgttgtcgttggttatcatatgatagtttcatctttttataatcatctaaaatgaaagctaaaatgtattcagataattgtttagcttgaacaccttttccattagttaaaagtatgccgtgatctgcaatataatctaacggtaatgtatttacacccgttgcaaaccatgcaatccattttaaattcgggcaacgttgtaaaaatgcctcattgataccgccatcataaccaactaatatatctaaatcagccaagtcactctcaggtatttctgatgcttttttataaaatttaaaatctaaatctgaaaagcgttgttgtaattcagtttcaacttcacgcatacgattcaacccaacaactttcatatatgtcaccccaaaatgtttttaagttcttctatttgtgttttaaccttaaccttctcgataacatctaatactttaccttgttcatctattataaaagtcgttcttacaatgcccatactttctttgccaaatgattttttcaactgatatacgccagtttctttagctaatttaaaatcttcatctactaataaatcgaaattcaatccgtgtttctcaataaaattttggtgttttttctttgaatcaccgcttataccatatactgcaacatctaaatcattgaacatttctaaattgtctctaaagtcacaagcttctgtggtacaagtaggtgtattatctctaggataaaaatatataatcgcctttttaccttttaatgtatcatttgtaatgacagttccgtcttgattttctaatttaaatattggaaattgttctcctttttgcaacatataatcacctttttcttcattataataattttatgatacgatattagatgaaaatattaaattaaaagaggttgatataaatgaattttagtgaaagtgaacgtttacaacaactttcaaacgaatatattctaggcggtgtcaattccccttctcgttcttataaagctgtaggaggcggtgcacctgttgttatgaaagaaggacacggtgcatatttatatgatgtcgatggcaataaatttattgattaccttcaagcatacggtccaattattacggggcatgcacatcctcatattactaaagcaattcaagaacaagcagccaaaggtgttttatttggtacaccgactgaactagaaattgaattcagcaaaaaattacgtgatgcaattccatctcttgagaaaattcgctttgtaaattctggaacagaagcagtcatgacaacaattcgtgttgcacgtgcatatactaaaagaaataaaattataaaatttgctggatcttatcatggccattctgatttagtattggttgcagcaggtagtggcccatctcagctcggttctccagactcagctggtgttccagaaagcgtcgcacgtgaagtcattactgtacctttcaatgatattaacgcatataaagaagcaattgaattttggggtgatgaaattgccgcagtattaatagaaccaattgttggtaactttggaatggtaatgcctcaacctggatttttagaagaggttaatgaaatttcgcataacaatgggacactagtgatttatgatgaagtaattactgcattccgtttccattacggtgccgctcaagatttattaggtgttatccctgatttaactgcatttggtaaaattgttggcggtggtttaccaattggaggctatggtggacgtcaagatattatggaacaagtagcacctctaggacctgcatatcaagctggtacaatggctggtaacccgttatctatgaaagcaggtattgcattactcgaagtactagaacaagacggtgtttatgaaaaattagacagcttaggccaacaactagaagaaggtttacttaaattaatcgaaaaacataatatcacagctacaattaatcgtatttatggatctttaacattgtactttacagatgaaaaagtcacacattatgatcaagttgaacattctgacggcgaagcgttcggtaaatttttcaaattaatgttaaatcaaggtatcaatttagcaccttctaagtttgaagcttggttcttaacaactgaacatacagaagaagatattcaacaaactttaaaagctgcagactatgcttttagtcaaatgaaataacttttaaggaagtatatttttaattgaattaaaataaaacaaatgctcacatagtagattcattttatatcgttaactattaacgtttaacttgatatgtcactatgtgagtttttattttacaaatttatactcttttaatctctgactaaagttttacatcgctatcagtattatgtatgatttattttaacaactataaataagcttgaattttgtaactagtaagtgtataacagtaatgaatacgaatattagatattcaataaacttaaaaggggcgtcattatttttgagactaggagctcggatttttaaaactggtatagccattattttagctatgtctatcgcttctttactaccggatgatgttggtctgaaagccttagctggtgtcagtgctgttgttgcaatgcaacctagtatttatcgttcatttaaaacagtttctgatcaagcattgggtaacattataggtgccatactatctgttacaatggtaacaatttttagtgataattttatcattatgggtgttaccgtcatagtacttattgctattttatttaaatttaatttagcacatgttgctactttggcgagtgtaacagcattaatcattatgggacaacataccggttctttctatattaccgccttttacaggtttgtacttgtaatgattggtgtcataagttcatctctagttaactttgtgtttctaccacctaaatttgaaacaaaaatttactataattcattaaatatatcctcagatatttttatgtggtttaaattagtattaaatgatacgacggagtttaataatattaaacaagatagtcataatttaaaacaacgtgtcgaaaagttagagaaaatttatgattactatagcgaagaacgtcctattacaaaaaaacatattcaccaacagaatagaaagaaaatacttttcagagaagtagttcagacgactagacaagcttatgaagtattaaacaaattgtcgcgttatcaaaacgacttatatttacttaataacaatttcctattacaaatcaaattagatttagattcattaactgcttttcacgagcaaattttagctagcctttctaaaaaagcacgttataatgtgacacatgttgattatgagttagataatccgcagaaaaaagatttattgtctacatttcagcatgagttaataaatcatccttatcaaacggaatattcgtttgccaatgttatgcaaattgttgcagccatcgaagagtatcgacaccatttagagcatttagaccgcataagaattagctttttcacatatcatagatctgatgcagacattgaaattgttgaagaagactttgatttataacattaaaaaaattcctataattaatgccacaatgagataaagtaatattgaatctcgaaattaaatttaaaaaagcagtaagattattttcaattaagaaaatctcttactgctttttcttatgttatgaccccaccatcctgttacaaattttctcttcaggattgtactgaagtcaaacaactaatactttataagttttgaatgctatataaatgctcgtaagcaccttgttttgcaatcaattcacgatgcgtacctgtttcaacaatatgtccattttcaattacgacaattttgtcagcatgtgtaatagtggacaagcgatgcgctacgataagtgtcgttcgatctttactcaacacatctaatgcttcttgaataatggattcactttctaaatcaagtgcacttgttgcttcatccaagataagaattggcggattatttaaaaatattctagcaatcgataatctttgtttttgaccacctgataatttaacacctcgttcacctacttcagtgtcatatccctgtggcaagttcataataaagtcatgtgcattagccattttcgccgcttcaactacttcttcatctgttgctgttggacgaccaagtaaaatattttccttaactgtatcagagaataaaatattatcctgttgcaccaatcctatttgatttcttaaacttcccgttaaaaaatctttaatgttgtgaccatctattaaaatttgcccagaagttacatcgtaaaatctcggtattaagttaattaatgttgatttaccaccaccactcatacctacgaaagcaactgtttctcctttttcaatactcaaattaatatcttttaaaattggagcttcgttatcgttatattgaaaactaacatgatcaatatcaatacgaccttgtttaatttcaataggttgagcaccaacaccatttttgatgtcataatcttcatcaattaattggaatacacggtccattgaagcaaaactttgcgttaaagttgtaaatgatgcgactaaacgacgtaaaggcccgaacaataactccaagtatccaacaaatgctgcaagtgtacctactgtgattgatccagaaatagcaagatatgcaccaacaccgatgacaattattggtccaatatctgtaactgtattaattgcggcaaaggaataggcattccatcttgtatgtttcaaagcacgtgttaagaaattagtgttctttttatcaaagtttttcgcttcattgtcttcaatcgcaaaacttttaacgactgaaataccttgaacacgttcatgcaagaatccttgaacctcagctaatgcttgcgatctttcacgcgtcaattttcttaatcttccaaagaaaacgtacaccgttaaaatgtaaaatgggaagataaacagtgctgctaaagtcaatttcacatctaaaaagaacattatggatagtgcaataataattgttatacaatctaaccaaatattcattaacccggttaaaatgaaatcttttgtttgttcaacatcattaatcactctagatattacttgacctacttgattattagcataaaatctcgcacttaaagcttgtaaatggttgtataactttttacgtatatcatacaatattttattacttgtccattgcgccaaatattgacgtataaattcaattggtggtctcactattacaaaaataaataatgcgataccaatggcaatagttaaatgatgaactttttcatcagtcgttagtgcgtggttattaatcacgccatctattgcatatttaattaaaagtggtataagcattggtataccaaacttaattatcccaacaataatcgttgcaaaaatacgatatttgtatggcttaacaaattgcaaatatcgtttaatcatacaatcccccctaatctattgccctatcctattcataagcataaaaatgaatagaggttggatacataatttgtagatgtaaattcttcttacaatttacatttttaaaattaagatatctcaacctctgtcatattcatgtgattaaatacgttgtcttattcgtatgttatattctattcaatttaatctatggatactgtgtccccacacgacagcaaaagttatcatacttctttacatcactaagtcaatataaatgatttaatcagtatttacactttatttgcttaatactgtctaatttttttgtaacgttctttccaaactttgataaaatctggcgcgaatgggcccttcttctgttctatccattgttgaagaatgtccacgttgcgtcttaaaataatatcaatatcatgcggataattcatttgattcatatgttgttcatattcatcttcatctaataaatgatactttccgtttggatatactttaatatctaaatcatagtctatatattttaatgcctcttcatcacaaacaaatggtgatgacaaattgcaatagtaataaattccatcttctctaaacatgcagataacattaaaccaatattctgagtgaaagtaaacaattgccggttcacgtgttatccaagttcttccgtcactttcagttactaacgtatgatcattgccaccaatgacaacatgatcagtaccctttaatattgttgtttcagaccaaacgcgatgaatcttaccatcatgtttataactctgaattttaatgttttccccttctttaggtatggattctctgaccatactccacaccaccttctgttaatttaaccattataaattatagcatatttcagaaatagtattatataaatacatatttttacgaaataagattttactacttaataattaaactcggtaatattgctaagtactacaacagagatttacatgtcccatttaaagtatataaaatcatcacttttatatatcaacactttaactttttgacattgttattctatgagatttaaagatatcatttatactttttaaaattaatgtcactatgttttccgataatattaccaatcatcgaatgttacccatttataaattgataaatctttgacataggtacagggaacgtatattgatctcgatcacttaaatcaaaccaaatcatgtcatctggtaatgtttcaatgttaattgttcctgaaacggcgtatacctttatcttccatgttaaatgagtaaattgatgcttcaactcaaaaataggtgtttctactggttgaatgtcatgtccgattttttcggtcatttcacgcctagcatgctcactttcaaacataggaaattgccacataccatgcaataatttttcgctacgcttttgcaacagatattgaccttgattatttctaattaaaaagacggattgctcaattacttttttacttacatttttagatttaacaggtaacttttcaaatgtacctttatcaaatgcctcacagttttcttgaactggacaaaataagcataatggatttttcggtgtacaaattaatgcccctaattccatcatagcttgattaaacgttccagcttctgtagtaacatacggtaacaattcttgttcgtacgatttcctcgtcgattgtaatttaatatctcgatagtcatcattcaatctagaccatactcgaaaaacatttccgtctacagttgctagtggtacattatatgcaatgctcattactgcagcttgtgtgtatgggccaacaccttttaacgctttaaattgatcaggatctttgggaactaagccttcatatttatcataaacttctttaatcgccgtatgaaaatttcgagctctactataatatcctaagccttcccaatactttaacacttcatcttccgaagcttgactcaaaacttccacagttggaaatcgttcaacaaaacgatgataatagtcaataactgttttaacttgtgtctgttgtaacatgacctcacttaaccaaatatagtacggattggtcgtttgtcgccatggcatttctctttgattttcatcaaaccagtgtatcaaattttctttaaaactagactgctgatacatttataaaaccctttcctcaccaaaattaattgtctttactcataatgtttttattgtacattaaaatcatggttagtatgtaagttaatttagttatttgcgaaattggattataatagtatatataatattatgaaatgagtgaactgatatggacactgcaacacatatcgcaattggggtgggccttacagcacttgcaactcaagatccagcaatggcttctacgtttggtgcaacagctacaacccttatcgttggttcattaattcctgatggggatactgttcttaaattaaaggacaatgcaacatatatttcgcatcatagaggtatcacgcattccctccctttcacaatactatggccaattttaattacatttttaatattcacgttctttagtggaaccaacccatttcatgtatggatgtgggctcagctcgcagtatttttacatgtctttgtagatatattcaattcttatggtacacaagcacttagacctatcacaaacaaatggattcaattaagtgtgattaacacatttgaccctattattttcacagttctttgtattggtattgtattatgggttataggcttgcatccatttgcagtcttctttcctataatcgctttactaatcatttattacatgattcgttttaaaatgagagccgtaattaagcaacaagctttaaaagcaattcaacaagagcatcaccctgttaaagtatttgttgcgccaacaataaaatttatggaatggcgtgtcgcgatacaaactgatgcacatgactatgttggaaaagcatatggtaggaatgtggtgtttagtgataaagtggaacgtcaaacattatcaacagactccattttatggaaagtcaaaggtaataaagatatacgtacttttttaaacttttcatcaatctatcgttggcaaacaacaacgttagcagatggttctactgaaattcgtttgattgatttgcgttatttaaaaaatgatcattattcatttgtggcaattgcacatgtaacaaacgataatgtcatagaccactcttatattggctgggtatttacagaagataagttacaacataaactgtatgctaaataatttcaagttattattcactaaagttaatctataaaaaatgaacaaccgggcagaatgaaaatcaaaacgatttttactctgtccggttttttaatgtaaaactatgaatgcttttacaaaatctaaaatttatattgttgctaacaaactacctttaatgactcgaaatatcaaaatcagtataggaaaacaatatctagatgatattctaattgtttctgattctcacagattaatttacacaacaggtcagctaaacatcatgaagaagtatccgcctcgtctgtactatcatttgaaacatcctgttgattatcagtttgtgtcactttagatgttttattataaattgcgtgtgtcgtataccttgctaatacgaaatttactgcagctattaaacataagaataaaataaagtaaaaatgatatggaatgttttccatacttgatataccaaatatgatagattgtgctataccattaacaatgtaatacattggatttagcattaggatgtgattgataaatacatgatttggatttggtatgaaaataattggtaacaataagaaacacaatacacaaaccccataaaatatgatatttattttttcagttaacagtcgaataagaccaaaagtaacggatattaatcctacaaaaatagttgccatcacaataaaatagaatagcgctatatatgatgtttcgaagtttactggtttaaccaatgcactaatcatcgtcaaaatgactagcataataaaacttaaaatagacataataactactggcgtcgctgcggaaatattaaataacttagtaactaaaaagtcattcatataatgatgataagagatataaattgtgaacatcactaccgcaaaaacaatcaatacaatgattctaaataaccatctcacctctttaacatcggtcaaatgactaaaggaaaatagcgtttcacttgcaataataagtattaaacatgcagctaatacgattagaaaacttttccaactttgttttaaacgttctgttacataccttttagtatgcggtaagtttttaaaatataaaataatattatctagcatctttacacctacaattcaatataaatccatttgtcttctttcaaattggcaatacaatatccattcccaactttagtaatccaaatgttattgttaatattaaacttatcttttaattcttttttatctacaattggataaacaaaaccgtataactgattattatcattgaaaagtaattgtatcggttgttgtgtaacggatgcaacgaaacggttatcatcatcaggaactaaagtttttataactgaactatgctttttatgtaattgactattaaagtatgcatagtaattactataatttgatttcatatatggtgctaattttttaaaactatgcgtttgatataaacctgccgggttaaaatattctaatttatctttactaacatagtaagtcttattatcagcggtaacacgataatttttactattttcgccagtaattgtaactacactatattttggaattgtgacttgtttatccccttgcatatccacactgccattaaaagcaattccataagctaacttttcgccatatggatctttattttcattttgcatcgtagcacgattcgtaaaatctgttatcgaaataattcctatattattgaaaatgagcaacatcatcaatgctaagcctaaaatagtacctgaggctaaagtccaaaaacgcactaaaaacttaggcggttttgcatgattatagcgctcaacacgtttgaaattataggtcatctctggtattcttgtacgattctttttccaatctaaatcaaagttttcaatttcttcttttgagtttagacttaatcgatcacgttcatgttctttaaaagatggaataacttgtttaagtgacccttccattcttaattgaccatgtgaaaaccaagctatgtagttactcacttgtgaaattttatcaatatcatcaccaattgacacaatcgttaaattattttcaatataatcatttgttaattcaatcgcacgttccataaattgtggtgttaaatagtcaataacatgatttaaaataataatatttgattttgatgagcgtgcaatacttaatagtaattgagcgtatgccgctttcgaaatatggttaaccggcttcgttttataatcacctaaatgtgcatattgaataatctgttcagctttatgatcattaatttcatatggaaatagttgaactaactgcgctgtataagcttcaacagtttgatgaattaacgattgatcttcaatatatccgtagaacaaatcttcagtacaaactactttacctttatcaggtttaattgcacctgccaacaattgacctaccaacgctttggaagattcaggttcaccaattatacctaatgcttctccttgataaatatgtaaactaatattgtttaaatcgatatcttcagcatcatatccaaaaggtaaataccatttcttattctgtttattcctatagtagtgtgttacttttagtaactttaaaacaattgaacttcccatctattttcatccttctataattgtaataacgctataggtaagccttcttcgggttcatcgctattaaatctaaacccccacgcaaaaataccttttaatctttctactttaaaatattgattactgccatcagtcagtttataaattttaccaatttctatcttttttctgtctactaagtaactttcggcaacaattactttactttgataaacgtcatattcatttaaaataccattcatctcagcttttctcattttctctttataaagttgtatttcgtgtcttaattctggctcagacatctcactcaatttcttctgttccatcggcaataccactttcttctaatttagctttaattttatcatatttatatccttttctcataaggccttcgatagtttttgaaattaatttctgttgcgtgtacttctttcgatttttattataaattttttctaaatctcgttgtaataaatcgtctaaaaccgcttcatcttgtgtaaaatccatttcattcaatacagcatgaatggtttccatttcaaaccctttttgaattaaagattgcattactttttctttaactttattttgtggccctttttttgttttagatattttttcagcaatttggataatatcatcaagttcctgttgttctctataaagttctgtaaatatttcaatgatatttggttctataccaagttgatatagtttttgttgataaattttaggtcctttatctgtcgtgcgaatcattgtattttttaaactttccgcataatcttgatggtcgattaacttttcgcgataacaatattcaatcacttcagaaatcgcttgctctgatatctcttctttttgtaaatattgtataacttctttttcagttctctttttatatgataaatattggattgctttatttaaacctatgcgataatgatcatacttttgaatctctgccatgtcagcagcttcaagttgttgccctttttttaaattaaatttgactaatgtatcaatatctatacccatttcaaattgttcgtctaaaaaaagattaaaccgttctttgtttttcttttgaacttctattttagtaatcttcggcattggatcaccccgttactttctcaagttttaatacaatactcttttattattcaataagccacttcctatagcaaatgtttaactttaaatatttttcgatgctaacaaaaaatcacactatcatcttttaaaatgaaagtgtgattacaagcaaatctgtaaaatttataaagcagaaacaattcaactttatcattatgacatttcaattaaaccttctacattatagttccaagcatcttacacatgaatgcaagtatttaacgatttaattgtgacatagcctgttgatattgtgtttcattgatataattttgttgcttcattttttctaagttcgtgcttacacgttgcgtaaaattctctgacatattattgatattatatacgctaggtgcattgactttactagctaaaatagcgctttgtaaaactgttatgtgagacattgttgtactatttttattcacggttgttccaaagtaatggtttgctgcgccctcaagcgtatattgattatccccaaagtaaatattatttaaataaaagcttaaaatttcgttcttattatattgtttttcaactcgatgagctacaaataattcttttacttttctagtaaatgaacgatcattatcataaaaataatttttgacaacttgttgtgtaatggtactaccaccttgcacatctctgtcgctaatcgttgaaaataaagctctagttgtacctttcaaatcgaatccatgatgattgtagaatcgttcatcttccattgaaataaaggcacctttaacatactctggcatgttatcagctgacacaaaactacttttattttcaatttttcttagttcatccacattatcgcgtgtagataaaaaatacatgataccaataaacaatgcgataatgattagaatggttaataatattttcaatagtattcgtttactttttttctttctcggcggtttgccaactggttgataatacgtattatagtgaggttcgtgtttcatatgctcaaaatgttcatttgagtttgagtacctatcgcttcttttcatgcgtttgctccttcttttaaaactcacttagtatataccttgagtttaccagtactatcacaaataggctacactttttgggaaaatcagtccaagggcttacaatcgtatacgccatcatacttacttttttgttttttgaaaaaattatagataaatcattgcaattttaaatattaatcatgtcaaatattgttatattttgtaaaaataaaagaccatccctattaaatgccaatagagacgaccttttatttgttattcatttattaaaactaaaatccatatttcatttcaaacgaaaatatataaattttaacaatcgataaccacaatacttctattgtaattgtttaacgatttctcgattaaaatcatctaaatcgtctggtactcgacttgttacaatattgttgtctacaactactgactcatcaactacatgtgcgcctgcatttgataaatctttgcgtacatttaatactgctgttaacgtacgaccttttaaatcgtctgtatctattagtatttgtggcccatgacaaatggcaaatgttggtacatcatttttagtaaagtatttagcaaatgtgccatatcgaccttctgtatctccacgtaaatgatctggtgaaaatcctccaggaattaataatgcatcataatcttctggtttagcttctgcaatgcctacatcgacagtaactttttcaccgtgtttaccaacaacttcactatttgcagtatctccaatcactacagtattaaagcctgcattctctaatgcctctttagggcttgaatattctatatcttcaaattcgtttgctagaataattgctacttttttagtcattgaaaatcacctttctatatatcattgatataattactatagacaagtaaatcagtgattaaacatacaagatataaaaattattaagcgactgtcgcgatatctaaccctaacacatcttatgtggcatttacttagatactaatttaaccttttcttcaagctgatctaacaatccaatccattcatctatatcttcaacacgtacttcatcaggatttacatgatcgatatcctcaataaacttatttaaacgcgcttttatctgttcgattgtttgctgttcattcataaaaagttaactccttttattttgttttctttttcattattatcctaacagaaattgcgttaaagcgatataatcttagctatatttatgacattcaaattattttgacttttaaaaatccccttttcaattaactaaaattaagagataatttgttacgagtgataatacgaagtggtatcataccgatatgaaccaaatagaaagaaggaagtttaagacgatgaatagcgtcaaattgaagcaacctgttagcatttacaatgatccatgggaatcatataacgatgttaaagaacatggccaattaactttaagtaacattgaatttacaactacaaatctttgtaatatgcgttgtagccactgtgcagttggttatactttacaaactgtcgaccccgagcctttagatatggacttaatttatcgtagacttgatgaaattccaaatctgcgaacgatgtcaattacaggtggcgaaccaatgttttctaaaaagtctattagaaatgttgttaaacctctattaaagtatgcacatcatcgaggtatatatacacaaatgaattcaaacctaacattgcctcaagatcgttatttagatattgctgaatatatcgatgttatgcatatctcacataactggggaacaactgatgaattcgcaaatgttggctttggcgcaatgaagaagcaaccaccgttaaaagctaagttaaaattatatgaacaaatgatttcgaatgcacgtacattatcagaacaaggaatgtttgtatctgcggaaacaatgctcaatcaaagtacgctaccacatttacgaaaaatacatcaagaagtcgttcatgatatgaaatgtagcagacacgagattcaccctatgtatccagctgactttgcaagtcaattaaatgtgttaactctagcggaaatgaaaaagacaattcatgatatattggatttcagagatgaagatatttggatgttatttggtactttgcctgtgtttccatgcttaaaagatgatgaagatcaaaagttactatcacgtttaagaactgctaaaaatgtaacgactagaaatgacccggatggccgtagtcgtttaaatgtcaatgtatttacaggtaatgtaatcgtaactgatttcggagatgaaacaggtacaatttcgaatatacaaaaagataaattaacagatgtatttgataaatggttatcgtctaatcttgctaaatcattaaattgtcattgttccgagtttagttgtttaggaccaaatgttcttgttaaaaatatgtactatccgaatatggattttaaagataatgagcgtcatatgcacaaacaaccacaaattatacaattttaaaaactcttaattatgcggagaagcactttatcgataagtagtctccgcatattttaatgctattataaaataaaaagcaattaattgctggcagtactctactttaataataaaggtcatttaataggactaatagtctataataaaagggttaaattttaactaaaagcataaacgtgcataatcaaaaagacagattgtaggtggaatattcgaacataacagttcaattcatccttaacaatctgtctttatatttttagtctctaatatgttgcacttgagctaaatattcaattgtttgtttactttcaatgcgacgtgcttttcttcgttcaacacgttgtggtgctgtatcataaaaccatttttcaacatcatcttctggatatacaccaggtacatgtttaggtttgccttcatcatctaacgcaacaaatgttaggtaacttaatgcagctaaatcatgcttgttattaaatacatcgtcaattctaatttgaacgaccacttccattgaactagtcccagcgtatgaaaccatcgctacgtattgtaatatgtcccctgttttaatcggctttaagaaatctactgagtctgtagatgcggtaactacttgcgcaccagcatgtttcatagctgtgattgctgcaatttcatcaatattagccatcaatgtaccaccaaacattgtatgatggtgattcgtatcttgagggaaaacttgtctatttttataacattttgattctgacatagatttcattggtctgtcctgatttgtcattattttatctcccaatctatactttaatcacgtatttgacctttaaatacatgtttcatttcctactcagcacctcaaaatacatttattaaaatgttgatgcccaatttccattttcaaatactagttcttttgaaccatcttcgaatatgccataaatagtcaaatcactactaccaatcatgaaatcgacatgtacgtttgaatcatttaatccgcttgcaatcttttcctcaacagtcatttccgttccaccttgaatattaaaggcgtaagcagatccaatcgctaaatgacatgctgcattttcatcaaataaagtattgtaaaaaatggtattacgatttgatatcggtgaatcatcaggtactaatgctacttcacctaatcttcttgaaccttcatcagtattgattaaatctttcaataccgcttcacctttttcagctgaaaaatcaataatctctccatctttaaacatcaatttaaattgatcgataattgtgccattataacttaaaggcaatttattagtaacatatccatctactctatttcgatctggtgctgtaaatacttcttcagttggtatattagcaataaaagcttgttccttgccgttaacataacttgtagcatcttcccagatatgatttttcgctaaacctactgttaaatcagtaccttcagatacataatgcaacgcatggtaatttttttgttgtaacttttgagcgtaaacacttaaattagcgatgtgttgacgccaattttcaactggatcgttaccatcaattcgcacaatatcgaatacctcgtcaataaacttaatatatgcttcttccacagatagttcaggatacactctcttcgcccaagctttagatggaaaagcagctacgacccatggaaattgatttttttgtacactttccatatatcctttaaatgcgcgtgcgttttgttgttgaaatgcttgtaatttttggctatcgataccatccattaaatcaggatcttcactaataagtgctaaattagcagcgccacgtttaacgtaatccattctcgcttcaacatcatatgattttatctcatgattagcaaaatgttccacagattcattttcaaattttaagcgttttaaggttggatcgctatatacaacacgtacatctgaagcgccacaatgatatgcttcttctacaattaaatgcgttaattctaatgtttctactgatgatctaataaatactggctgttttggttgaacattcataccaaccttaactaatagttcagcgtattgttgtaacttttctttgtaattagtcaaaattcccactcctagtcgtgtcgcaattgtcctaaagcgtcagcaatagctgtcacttcacttggcgacaatctttctcttgattgaacaaaatcatatatatctgttaattcttcttcatttgcatttttatatttttcaggatctaataatccttgattaacaatatttaacttctctctaatagataatactttctcttcatttgtcatagccacaatgttcacctctaataatagttatgttatcaaagtatcacaatttaataaactttaatagaattttatataatctgctttcttattgtttaaagtcgctataaaatggggatataactacatagtttggaggaatcaaaatggtagatgtagcatttgtctgtcttggcaatatatgtcgttctccaatggcagaagcaatcatgcgacaaagacttaaagacagaaatattcatgatattaaagtacattcaagaggtactggtagctggaatttaggagagccgcctcatgaaggtacacaaaaaattctcaacaaacacaatattccatttgatggcatgattagtgaattattcgaagcgacagatgattttgattacattgtggctatggatcaaagtaacgttgataatattaaatctatcaatcctaatcttaagggacaattgttcaaactgttagaatttagtaatatggaagagagtgatgtaccagatccatactacacgaataattttgaaggtgtatacgacatggtattatcatcttgtgataatttaatagactacatcgtaaaagatgcaaatttgaaagaggggtagttttttatggaaaataaatttgttcctggtattttaattggtgccgtaattggtggtgcaattagtttagctgataaatctacacgtcaagctttagttcaatcagttaaagatgcaaaaaatggtaaccgcactcgtaagccttctaaagtcagcaagattaaagacgaagttttatactggaaagatgttgttgaagaaattcgtcgtaataatcctgaattagaacgttcattaaaagatgcgaaagaaacatttgttaatagaaaaaatcaacgctaagatgattttgtttttataaggcaatacttaacaatttggtgtacgcctttcatagttatcattattaaatgataatacaatgattggccaaactgcattgtttcagtattgcctttgttttaattttaaatcaaaatagcctatgaaagatttaaatcaattaatttctataatattatcatttttaaagcatatcattgtttagtttttttataattggataaatactaatagttactttataaaacattacatagagaaaggttaaggagtgcacatgtcgaaaaaggatcactcttcttcaaaatatcttaattctgttaaggaagcacaagaggagtcaaaaaagaaaaataaaagtaatcccaaaattgatgttgatcgtacatatattgaacctcaacaattccaatctaagaaacctaaaaaagatgatcaggttttcttcttatcaagattaaataaacctgcaaaatataagaaagactctaatttcttatcatatctcatctatcgcataggaaaagatgatgcctcaggactagcagcacaaatgacttaccatttcgtacttgctatgttccctatgttgcttttcctattaacattattaccatttttcaatattaagcagagtcaaattactaatatgttaagcaatgcacccgctgaaacatctactctaattaagagtgtaattggtgatataactcaaaactccagtggtggcttattatctatcggtttgattttagcaatttggtcagcttcaaatggaatgactgcaattatgaattctttcaatgttgcttacgatgtagaagatagccgtaatggaatcgtattaaaactactaagtgttgtcttcactgtagttatgggcgttgtgtttgtagttgctctagcattaccaacgcttggttctgtaattagtcatttcctattcggtccacttggatttgacgaacaagtgaaatggatttttaaccttattagaattgtgttaccaatcattattatatttatcgtatttatcgtgttatattcggttgcacctaacgttaaaacgaagcttaagtcagtattaccaggtgcagtatttacttcaattatttggttagctggttcatttggttttggttggtatatttcaaattttggtaactattctaaaacatatggcagtatcgcgggtatcatcattttgttactatggttatatatcacaagttttattataattgtcggtgctgaaatcaatgcaatcattcatcagcgtagtgtaattaaaggtaaaacacctgaagaagcagcattagaacatgatgacaataataaaaatcattataatgagaacactagatacgaatatgatgaagatagtaatgcaacacatcaacgtacgtaccatgttgatgaacatcctagtgatacctatccagaagatgataaaaatataaaagacaaaatcgttgataagcttaaaaaagactaaacaccaacaaaacagaggttttcgctaatgattgcgaagacctctgtttttggtgtctatttgatgttatattgtgattggcgtaagtaacttttcttaattcaatacgaactattgaattaaattatgttggaatgcatagatgacagcttgtgttctatcttgcacttctaacttacttaaaatgttactcacatgtgtcttaaccgttttaatagtaatatgcgatgcactagcaatttcttgatttgagtaacctttcgcaatcaataataatatttccatttctcgttctgtaagcatttcatataactctgcgcgctttttcatacggttacgcattttcactaaaacttccggttcaaaaacagattctcctctagaagttttacgaactgcatcggcgatatcttttgcacttgttgtttttaaaatgtaactatcgacacctgcatctaatgcacgatatacctctttatcttcaataaaactagttaacattaatactttaatttgcggtaaatcttttttaatctgagtcgtcgcttctacaccatccatgtcttccataagtaaatccattaaaattaaatctggcttcaactcatgggctttggcaattgcttccttaccagaagcgccttcaccaactacttcaatatcactttgcgttgatagataacttgaaattcctatacgtaccatttcatgatcatccacaaacaatactttaatcgtcatacgaatcctccttatttaaaggtgctttcacctcgatacgtgtacctgaatctggcaatgatacaatatggaacgttgcaccaatttccaaagctctttcacgcatatttttaagtccataactttgttctaatttttcatcaacattaaaacctttaccattgtcttgaattctcaacaataaataatcgtctttattaaacaattctactgtcacttttgtaccgtttgaatgacgcaatgtattcgaaattgcttcctgtgtaattctgaacaaatgatcttcaatacctttaggcactttaaaatcttgtatttcatgcacaactttcatcggcacttttttttgtaaatcaataactaaatctttaataccctcacctaaagatttgtcttttaaaccaagcggtcttaaatgtaacagcaaagcacgcatttctaactgcgaatcttgaaccattttctctaaaatcggaatttgttggtctaatggtggttctaacttcgtttctttgatagcagaaagcatcatacttgccgcaaaaagttgctgactaacagaatcgtgaagttctcgagctagtctttgacgttcatcttcaataatctttttaactttcacatcattaatattataattttcattggttaaattttgagttttaagtcgcaacttatgcaattcttgatttaaaggtacgagtgtatggtataaatctaacgtttcactatatatttctatattttgatcattaatgccaactgtttcgccttccattgaacgctcaatttgcgtcttaatccaatcattttgctgattgattttgtatgcgagtaccgaaccaacaataatacacaataatatgatgatgagatttaaaaataaaaagactggtattccgaatatttgtgtataaaacataccttgaaaatagatgatatttacaaaaactttatcgatgaatagaaatgcagctagcatgctatatactaagatgagcattgaaccaattgttctaatgtagtggttcatcgataaatcacctctacgtctccgataaacgttgatacgtagatattaactgtatagttatccggtttcatcatttcttcaatatgaatattgttattttcaactttatatgatttttcattcacgtaagtacttccataaaaagcagctacatgtaaattaatattgtaattaaccggcaatataacctgcactttacctaaaatgtgtctaacaacaatggtattattttccttaatatttgcagcttttgttaagtcaatatgtaggtcgccaattccatgttgaatttggacatcttcccatttatatacataaactggtgtacgttgctcaccaaaccacttttgtttaataaaagatggtgaagtcataacctcatccgtcgcaactactttttttggtttaaatttgtgtattaaataacgcacaataagtagtaataaaaagacgaacaagatgatgattgtatacttattagacaataatgtgaatgcaattaatagcgcgcctatccaaaacgccaaaaggccacgtattttatgaaaataaagatatcctacataaactaatacacatcccaataatagaacgagtaaaaagccaattttttcaaaaaatatgtagtaaaaattggcaataatcattaatgcagtaaaaatgatcaacatttgcgttgatatatatttgtgtgtcatgtttcgccgcctttctatgccacagcgttcatataatttattagatacgatgttttttctgttgctattttttcagttgaagtttgttgaatttgagtttcaatttgtgcataatatgcttcaactttattcaactctgatttaatattttcaatttcttgattattgatttctcttgcacattgaatttgaaatgcttcagcaatatcaatatatttattttctaatgttagcattagactgtcaattaacttgctaagttgttcttttttagtaattaaataacgcatataatcatctaaatttttcattttttcatctagcattaaaaggtagtgcttgatattatttcttactgttgctctcaaaaactgttcaatataacgttcaacatagttcataactatcaccttttataataagttttaaaataccaaatgcgctatgtatcttcgttgatgtcgatgatatgtttgcttaaaaactactttattacaacatatttttgaaatgacgcattgattgtgttcttaattattataaaacagttccgaaaccaatatgaataggctccggaactaaatgatgttcatactttagtcttagtatatgttgaactattcttcttcaatttttgtcgttaaaatcggaccatccttagtcacgataaccgtatgctcaatttgagcaacaaaacttttatcgctcgtttcaaaagcccattcatttttaccttctgtaacaaatgatgcatttgatgagataaacggttcaatagctaataccataccttcagttaataatgttttgtcttttggatcaaagtaattaagtacatgtgctggtgcttcatgtaatgataaaccaacaccatgacctgttaagtttttaatgactttcaaatcattttgtctagctgtattatgcaccgctttaccaatgttacttaacttagtacccggttttacttttgcaattgcattctcaaatgccatcgttgctacgtcacatactttttgtttcattggatcatctgattctccaacgacaaatgaaatgcctgtatctgcataatagccattcttcaaagccgatacatcaatatttactaaatctccttcacgaatgacacgcttacttggaatcccatgtgccacctcttcattgacactaatacacgtttgaccaggaaaattttcatcatgaattggcgcagaaatagcaccgtattcttcaaataactctttcgcaatattatcaagctctttcgtagtgatacctggtttggttgcagcttgcattgtattgcgcactttagcgcatatgtatccaatttcttttaacgcttgtaattcttcttctgtttttacaatcattttatcccgttccttttttatataattataacttattatagcaaaaattctttgatatactaaagatgttactttagtattttggaaagtgagtgagacatagtgtgataaagaaaaaatatttctttatcgttgtaccccaacttgcattgcctgtagaaattgtagatccaatttctctatgttggggccccgccaacctgcacattatcgtaagctgacttttcgtcagcttctgtgttggggcccacaccccaacttgcattgcctgtagaatttcttttttgaaattctctatgttggggcccacaccccaacttgcacattatcgtaagctgacttttcgtcagcttctgtgttggggccccggactataattgaaaaatgcttgttacaagtgcattttatttcagtcaactactaacaatataacattgtggagcccagaactttgattaatgtatatgaaaatcaaagtaatgcttaagtatgattatttcaaatattttacatacatgaacttttccaatgtacgatactattattataaagcgctcgctaagattttacgatgattagaggttaaaaaatgaacgatcaatggtataaacatttaattggtgccagaacaattaaaactggtattgccatttttttaacagctgtcttttgtatggcactagatttaacacccatctatgccattttaacagctgtagtcacaattgaaccaactgccaaggcatcacttattaaaggttatcgtagattacctgctacggtaattggtgcaggctttgcagtattatttacatatttattcggcgatcaatcaccttttacatatgcattgagtgcaacgttcacgattttattctgtacaaaactcaaattgcaagttggtacgaatgtcgctgtactaacatcattagctatgattccaggtattcatgatgcctacatattcaactttttgtctcgaacattgacagcaattattggactcgtgacatcaggtttaattaacttcatggtgtttccacctaagtattatggtcaggtcgaagaaaaattaagtaagacagatgccttgatgtataaattattttacaatcgctgccaagaacttatcttatcaagactgcaatctgataaaagcgaaaaatcatataaaaatattttcaatttaaataatcaagttgaaacgttaataagttatcaacgtgatgaattaagctatcataagaaaaaagaatgtgattggaaattactcaatcaattaactaaacgtgcatatacgaatcgtttgtttatcactcatttatcaaatatcatttacttacctaaaaatactcgtgttaacttttcaggtgacgaaaaaatggcattgctaaaaattagtagtagcatcaaagatatattttatgatggttcttttaagagagaagatgattctgtagaaactttacgttcgacaataaaagcacttgaaattagtggtgaaaatcaaattaaaagtcatatactatacgaagttctaatgatttatcgactgctagacagcagatatgcttaatttaagtaccttatactaattggcaccatgggagtgggacagaaatgatattttcgtaaaatttatttcgtcgtcccaccccaactcgcattgcctgtagaatttcttttcgaaattctctgtgttggggcccacaccccaacttgcattgtctgttgaaattgggaatccaatttctctttgttggggcccacaccccaacttgcattgtctgttgaaattgggaatccaatttctctttgttggggcccctgactagaattgaaaaaagcttgttacaagcgcattttcgttcagtcaactactgccaatataacttcgtagagcatagaacattgatttatgtccccgcctctttttatcgtatatagcatgtccctttttaaaattacaagcataaatattcagactcaaatatagccacacccctaaactacggagggatgtggctgtcttttttgtttgtaattatgtatcagatttaaatcattaatgtaaagaggctaattcattaataaatttagtaaaatctgatttagcaacatttatccttaatgaaataccagattctgttgccatgtttgaatgccttaaaccagaatcaaaatcaatataaatacaaagcagttcttgattaaaatcaataattgtaaaatgtaaatcaggttctataaaatatatttcagtaacaggattgtcgtaatccatatgtttcaaattgtccatgtcactatcaaaaagtgcaaattcaaatttaacttcttgatcttcgaaagttgcactagtgtcgaaataataaattttattatcttcttcgataactacatcttttaaaataaatgttatcgatgttttgctatgtaaataagatgcatcttttaatatcaatttagtaggcttcatcgtcaaattcctttcatcattcattttttcatgttgcataatcaccattactattgataattctaggatagatactcattgtataataattattcactagaacaaaaaaaacacacatcaatttggttgtttccatccaaaataatgtgtgtgtttatacatatatgattaattactaaacttcatcgtttatcaatattaaatccattgatgcgatgttcagagttaacgagatttcttctgtctatttgctctgtctattaatacttgtttcgcttgtatttccgcttcattatctatttctttaggctcaaacggaatacccttacgttcacaagctttttctaacagataatcagtgatttcgtaatttttaggtaaaattggtccgtgtaaataagtacctaataaatttttataatgaatgccttcttttttatcttcatcattattaccataaccaaaagtaacatgaccaagtgtaccgaaatcatgatatgttctaccaccgtgattttcaaaacctacaatagttccaaaagtatcactttcgataacaatatctcctgttaatcggtttgtctttgattcagtataaaaatctaaaatacctaacccttctaattctgtaccatcaggcgtgatatattttttccctaaaaattgatagcctccacaaatcgttaatcccggcataccatcttcaatcgcttctttaagtggtgtcttaattttacttaattcttttgttgctaatgcttgttctctatcacttccaccaccgataaagaaaatatcacattcatcaaaggtaataccttctgtttcattgatttctacgacattaactttaatatttcgttttttagcacgttgtcttaaagcaataatatttcctatatcactgtataaattcaatttatctgacataaaatgataaatagtcaattcatgcatattatgattgacctccttcaaacgaacggtttaattgttcaagcataggcgctaatgatgtatagtttggtattgcaactgtgaaacctttataatccatagtctttgccgttgctttataaatatcatgctcaactataattggtacttcaacctctgctaacttcaatcgcaattgaagttcttctgctcgtgtacctgtcacgatgatagcttcaatttgttgcttagataatttttcaaaatctgcatcataaatccatgaagtatctcgaccatctgcagcgttatcatttagcgaaataacatacactttttcgccttctaattgttcaccaactgataaacttgcattcattcctgcaggatttttagctaaattgatcatcgcttcttttcgttcttttttaaagtactgcatacgaccattgtctgatgtatacgtttcaaagccatttttaattgtttgttcatttaaccctagctctcttaaaacagtatatgctgctaacgcgttataagcgttaaagtcacctgcaattttcatatcatatttttcatcattgatatttaaatataaaaacggtgccacatcaaaacttgatatttcatattttgcttgctctcgtttgaaaccacactgacagtgataatgaccaatttgattataatgaatataatcgtattgcaataagcgaccacagtttggacaatatctactttcattcatcgtactttgttcaaattcatgggcatgtgctttcataccatagtacacaatcgtatcacttgcgattttcaaacgactcacaaatggatcatcagcatttagcaataatttgatgcctttattactaattgtctctgcaatgttattaaccataatatcaatttcaccgaagcgatccatttgatctctaaagaaattagtaaataccatcattgaaggtgtaacttcttttaacacacgtggaatcgaaccttcatcaatttcgattaccgcaattttagtcttaggtgttgattgcatgatgaatgcagaagttatacctgcagccatattagcaccttcattattgtgtataatttgaatattatttgcttttaaagtatgtccaattaagtttgaagtcgttgttttaccatttgttccactgataaatacaatatcatcaacttgctctgctaattttcttaatatatctgtatccacttttctagcgatttgtccaggtaaatctgttcctcttttacctactgctctacttgctttacgcgccaatttcgctagatggattgccgtccactgtctcatgtgtttcctcctcaaatttccactcgcatcattataacatgacaaggcaacttcaaaaaagtttctcaatcacaaattgatacagtgtttctaaattataatcattctcatttagataattaaaaatgatatttattatcaattaaatatcgctaaatgatacattttctcaattagagcgctaaaataaggcattaaattataattattattatttacaattgagaatgagtttgttatactaagtttaattcatagtaattttaatttacaaataagaggtgtatcaaaatgttaagtaaaaatttattagaagcattaaatgatcaaatgaaccatgagtactttgcagcacacgcatatatggcaatggcagcatactgtgataaagaatcgtacgaaggatttgcaaacttcttcattcaacaagctaaagaagaacgtttccatggacaaaagatttataactatattaacgacagaggtgcacatgcagaattcagagcagtttcagcaccaaaaattgacttttcaagcatactagaaactttcaaagacagcttatctcaagaacaagaagtaacaagacgtttctataacttatctgaaatcgctcgtcaagataaagattatgcaactatctcattcttaaactggttcttagatgaacaagtcgaagaagaatcaatgtttgaaactcacatcaattatttaactcgtatcggcgatgacagcaatgcattatatctttacgaaaaagaacttggcgctcgtacattcgacgaagaataattaaacatcactacaatagacagataaatatcatacgacatgataggcatttgggtcacttacaataacccaatgtctatattattttgctttacggagatcactagattcattttctgaatcattgatctgcgttttttcattttcaaggctaattattgtatttttagtcatttattttttaaactactaatgttaataactctaaatttgatgttgaattaatttgacgattttaaagcatatcatcatttactttttaatcagagttacatccaaatgatagatttcacgttataccttcacgtataatattatgtatcgtttgtaagcaaatgactaaaagtctattaatatatacatttaattaattgaaaggattgactacatgatacaagatgcgtttgttgcacttgattttgaaacagcaaatggtaaacgtacaagtatttgttctgtcggaatggttaaagtcattgatagtcaaataacagaaacatttcatactcttgtgaatccgcaagactatttttcacaacaaaatattaaagttcatggcatacaaccagaagatgttgaaaatgcacctacgtttgactacgtatttccatatatgatgcaatttattgcagatttacctgttgtcgcacataacgcggcatttgatatgaacgtcttacatcaaagcattcaaaatattggtttaccaactccaaatttaacttacttttgtagttatcaacttgctaaaagaaccgttgattcgtatcgatacggtttaaaacatatgatggagttttatcaattagattttcatggtcatcatgatgcattgaatgatgccaaagcatgcgcaatgattacttttaggctactgaaaaattatgaaaatataacatatgtaactaatatttatggtaaaaatctaaaagataaaggctaggactaaataaaatactcccttcaaagtaagcattgtaaaaatgtaaactttgcagggagctttattttatataaagtcatatatcgtcatatttttataagttgattgttctaaattacctacagtgacaccaataagtcgaattggtacatcagggtcttttaaatcgttataaagtaaatatgcaatattataaatatcttcttcagaactaaccgaatctcttaaactcatctgtttagatagcgtttcaaattgataagttttaattttaaccgttacagttttagctgacttctgtaatttatttagacgttcagctgttttacctgacaattcccatacttttcttaaaatctcttcatcatcattcacgtctgttgcaaatgtgcgttcagtccctactgattttcttactcttgatgatttcacttcactatggtcaataccgcgtgccttgttatataaaccccgacctctttttccaaacaaacgtattaattcaaattccgttttctcatataaatctctaccgttaaaaataccattatcatgcattacttttttggaagctttacctacgcctggaaaatctccaatatccaatgtcatcaaaatatcatggacattttgataatcaatcacagtcataccatcaggtttattcataccactcgctaatttagctaaaaatttgttataagaaacacctgcagatgctgttaaatgtgtctgctctagaatatcttttctaatatactgagcaattttcgaagcaggaaggtctggtctcactaattctgtaatatctaaatacgcttcatccaatgacatcggttctaccttatctgtataacttcggaaaatagacataatctgcgcagatgtttctcggtaagcaccaaaattacttgtgacaaagtatccatttggacataatttatgcgcttgtgacataggcattgctgaatggacgccgtattttcgtgcttcataggatgccgtagagacaacacccctactgcttgctttaccaccaacaatgactggtttccctttcaatttggggttatctctcatttcgacttgtgccaaaaaatagtccatatctatatgaataattcgtctctcagtcaagtgctcacctccctactaatttttacttttataacgcacaaaaatatctcaacataattatacgctgtgtacgatttttttacataaatcttgcacttagcgataactatattgagataactacaagttgttataaaatcaattgctatttaagcatgatgatgaagacgattgagtaagaaaacataggtaatctgaaataattcaagcaaattcattttgttggtatcatcatattaaaatttattattgagtcggcttttgatgatacaaataaatactatcttcatcttgttgaacatatttaaaactactagatattgttaatgcaacaagcagaatatctataaagcaataagcagtatgcatactaaacataaaaataagtgatgaataaccaaataccttaattaaaataagcaagccagtacttaataggattagtggtgacagcataataattgagaattgccatttgttgaagcaagcatctgctgtttggaataagattctgtctttttttatattaaacataggtttgctatcttttttaaataaaagaaataatgctctatggataagttcatgtaaaatcaataaaataatgaatccagcaaacccatatacaagattgatgatgatattttgatcgacaaccgctgtgacacctaacgcccacttatacgtaaataaaatcacgaataacgcaataacaagttgcaagataataaaccttcgcatttgaaaattatttgtcgttaaatcaattttatgcattaccaaccctcccgatcatgacattcttattcttctttaaatatagtatacaatgtcacatttaatttaaaaagttcatatcaagaaagtaaattggctgtaataaaattttaatatacgacttctttcttcacttattaaggcgaaattttatctcaaatcatgtgcgctatttcaaattgaataatgccactgtctcaacatgtgttgtttgtggaaacatatctaccggtgttacctcttcaagttgatatttttcagctaataataatgcatcacgttgctgtgttgcgggattacatgaaatatagacaatacgcttaggttctaatgtaagcaaagtctgaataaacgtttcgtcacagccctttcttggcggatcaaccattacaacatctggtttaatcccttgtgctttccattgtaaaataacttcttcagctttcccacagacaaaagttgtattattgcattggtttatagtcgcattttgttgtgcgtcttcaattgcagaaggtactacttcaacaccgtatacatgttttgcatgtggtgccatatatagccctattgttccaataccacaataggtatctaatacaacttcattacctgtcaattgcgcatactcaattgctttattatataatttctctgtttgttcagaattaatttggtagaatgactgatcacttattttaaatgtactatctgttaattgatcaataattgtatctttaccatatagcgttatagattgacgtcccataataacattagagtggctatcattaatgttttgtttaatacttgtcacattaggaaatgcatctaatatcttctcaacaacagcatttttttgtggccactttttaccattagttacaaaaataatcatcatttcgtctgtatgatatcctgttcttacaaccaaatgtctcattaaaccttttttcaattgttcttgataaatacttacatttaaatcttttaaaatagatttaacttcattcatcacttcttgatgttgtgaatcttgtattaaacaactttccatgtcaataatgtcatggcttctttgacgataaaagcccataataacttcattctgttcattcttaccaactggaatctgggacttgtttcgatatctccaaggatctgtcatgccaactgtatcgttaatcttagaattatcaaaatgcgcttttcgctgaaacaaattaatcacttgttcctttttcatttcaagttgtgcttcgtatgataagtgttgaagttggcacccaccacaacgttcataatatatacatggcggtgcaacacgattctcacttctcgtatttatattaagcaacttacctatcgcaaagttcttttttactttgataattttatattcaatttgttcattaattaaagcttgtggtatgaaaataggaaagcgatctatttttacgacaccatggccttcatgcgttaaatcaacaactgttcccgtttttatgtcatttttagctattgcttgcaaaattttacctccaaaatgaacaggttaggaacaaaattatgcgcttcctaacctgccattatatatttcactatttctgtttattcttcgattaaattgtcatcaacatgatcattatttattaactcttcatttacaatatcattaggtgcaaagacatctatatgacgttctagatttaagaaattcgctggtaatttaccaccatattctccatctacatttagttgtaagtctgtgaatgatgaaatattaattgcctttgctttttcataaataactttaggatgcttagtatgttctcctcttgaagctaaagtcataatatgaccaagttctgcaaggtttgatttttcaactataattaacgtaaaatagccgtcatctaacttagcgtccggcactaatttttcaaatcctgccattgaatttgttaaacctaaaaagaataataatgcttctccttggaaaacattaccatcatattcaattcttaaatctacagctttcatttgaggtaacatttcgaaacctttgatgtaataagcaaatggaccaacaatagatttcaatttactcggtgtttcataagagacttgcgtcaattgtccgcctgcagctaaattaataaagtatcgattattcattttaccaatatctactttagtagaatgaccttcaatgatgacatcaagtgcccccatgatgtcattaggtatatgcaatgcacgtccaaagtcattaacagtacccataggaatgacacctagcttaggacgattaggcttttctgcgataccattaactacttcatttaatgttccatcaccacctgcagcgattaatacatcataattttcatgcatagctctttctgcttcaagtgtggcatcacctattttctcggttgcatatgcactcgtttcatatcccgctttttctaattttattaaggcatcaggtaattctcttttaaatagctctttacctgatgtcgggttataaatgattctagcacgtttcctcatatcttatccctctacttaaaattcatatattttaacttcatctttgtttcgtctaatagggagtgggacagaaataatatttaacaaaatttatttcgttctaccccaacttacattgtctgtagaatttcctttcgaaattctctttgtttggggccccaccccaacttgcacattattgtaagctgacagaaagtcagcttctttgtttggggccccagcccaacttgcattgtctgtagaatttcctttcgaaattctctttgtttgggacccccccaacttgcacattattgtatgctgacagaaagtcagcttctatgttggggcccactagaattgaaaaaagcttgttacaagcgtattttctttcagtcaactactgccaatataacattgtagtgcctaggacattgaatttatgacccaggctcagtcttatttcatcattcttaatatcgttaaagaccaacttgtatcttaaacaaatactatctcaatatgtacaaagcttgttatttattcagcattttttgccgttcttcattatatagacttcgtcagttatgctattttacctttaaaatgatgttgtaaatataatgttgtctttatacaaaaatgttttatacctttttattatacagtttgccttaatataattaaagctaacgcattaataaaattaatatttttaccattaacatgtacaatgaattaagttaaaagtaatatgacttctatagatataaataaaccctcgattgcatctaagtcagcaatcaagggtttattttttaaatcttcatagtttgatgatttaaattatcttttatctaattcttgttttaatagttgatttactaattgtggattagcttgacctttagacgctttcataatttgaccaactaagaagcccatagctttgcctttaccatttttgtaatcttcaactgattgttcgttattgtctaatgcttcatttacaaattttagaagtgttgcttcatcagaaatttgaactaagccattatcttccataatctgtttagcattaccacctttagctgctaactctgggaagactttcttcgcaattttactgctcattgttccgtcttcgataagtttaatcatacctgctaaattttctggtgttaatttagtatctaataattctacttgatttttatttaaatattcgtttacgccacccattaaccagttagatgttaatttaacatctgcaccgtgttcaattgttgattcaaagaaatctgacatttctttagtcaaagttaatacgtgtgcatcgtatgcaggtaaacctaattcatttacatacttagccttacgctcatctggtaattcaggaattgtctgacgaacacgctctttccaagcatcatcaatatataaaggtacaatgtcaggctctgggaagtaacggtaatcatcagaaccttctttaacacgcattaaaattgttttacctgttgattcatcaaatcgacgtgtttcttgtccgatttctccaccatttaacaattcttcttcttggcgtttttcttcatattctaaacctttacgtacatagttaaatgagtttaagtttttcaattcggctttagtaccaaatttttcttgaccatatggacgcaaagagatgttagcatcacaacgtaaagatccctcttccatcttaacgtctgatacaccagtgtattgaataattgaacgtaatttttctaaatatgcatatgcttctttaggtgaacgaatatctggttcagatacgatttcaattagcggtgtaccttgacggttcaagtcaactaatgaatactcacctttatgtgttgacttaccagcatcttcttccatgtgaagacgagtaataccgattcgttttgtttcaccgtcgacttcgatatcgatatatccattttcaccaattggttgatcaaattgagaaatttgatatgcttttggattatctggatagaaatagttcttacggtcaaacttagattctgttgcgatttccatatttagtgccattgcagcacgcattgcccagtctactgcacgcttattaacaactggtaagacacctggatatgctaagtcgataacatttgtatttgagttaggttctgctccaaaatgcgctggtgatggagaaaacatttttgagtccgtttttaactctacgtgaacttcaagtcctataactgtttcaaaatgcatgatttccactccttataatttttcataaacgtcatgtaaattgtattgtgtttcatattgataagcgacacgatataacgttttttcatcgaatggtttaccaatgaactgtaaaccgattggtcggccatttgattgtccacaaggaacagaaataccaggtaatccagctaagtttactggtgttgttaataaatcattggcatacattgttaatggatcatcaatttcttcacctaaattaaacgcagttgtaggcgctgttggaccaactactacatcataattttcgaatactttatcaaagtcatttttaatcaatgttctaactttttgagattttttatagtaagcatcatagtaacctgaacttaatgcaaatgtacctaagaaaatacgacgttttacttctttaccgaaaccttcagatcttgacattttatataattcttctaatgaatgagcttctttagaatgataaccataacgaattccgtcaaaacgagaaaggtttgacgaagcttctgatgatgcaatcacgtaatatgatggaataccaaatttagtatttggcaatgatacttcctcaacgacagcacctaaagattttaaagtttctacagcgttttgaactgctttttttacgtcatcagctacaccttcacctaagtattctttaggtaatgcaacttttaatcctttaatatctttaccaatttcagatgtaaagtctacatcatcaactggtgcacttgtagagtcattaacatctgcaccagaaatagcttctaatacgattgcattatcttttacatttcgagtcaatggaccaatttggtctaatgaagatgcaaaagcaactaatccaaatcgagatacacgaccgtatgttggtttcataccgacaacgccacaatatgcagccggttgtctaattgaaccacctgtgtctgagcctaagctaaatggtactaagccagctgcaactgctgctgcagatccacctgatgaaccacctggtactgctttatggtcaaatgggttaactgtttttttgaaataagatgtttctgttgaaccacccattgcaaactcatccatatttaatttaccgattaaaacggcattctctttatgtagtttttccattacagtagattcgtaaattggcacaaacccttctaacattttacttgcacatgttgtttctaatccgtttgtaataatgttatcttttatacccattggaataccaaataatttgccatccatttgatcttttgcttgtaattcatccaattcttgcgcttttttgattgcattttctttatccagcgctagaaaagacttaattgttggatcagtctcttcaattgcatcatatatatctttaacaacatcagatggtttgatttttttgtcttttattaaagttaataaattctcaaccgattcgtagcgaatgctcatcttacgcgtcctcctcattcatgattgtaggcactttaaattgtccatcttctgtttctttggcatttttcaaagctaattcttgcggaatacctttaattgctttatcttcacgtaaaacgttttgtaaatctaaaacgtgatatgtaggttcaacgccttctgtatcagcgctatcattttgttttgcaaaatctaaaatgctttctaatgtgttggccatttcttccgtttcttcaggagaaatttgaagtcttgcaagattcgcgatatgctcaacttcttcacgtgttacttttgtcattaataaaagcctcctttaagtcattcatcactaaattgtatcaaatttccaattaaaaatctaagtatttatgaggtgctactttaatttcatataaactgtataaacattatcattcgtttatcaaatcattttttatgaaaacaacactcttttaatattagacaacccaattcaatattatgattatgcaattttaattataaaaatttgctcatatccaaaaaatacgaaagcgctttctatattggtatgcaagtatttcaaaaagaataaatttaattttcctacttttctaaacatttatctttatgtataatgttttcaagtaactaaattataaattaaataaagggagtgtttatcatgcttacaatggggacagcattaagtcaacaagtagatgccaattggcaaacttatattatgattgccgtctacttcttgatactaatcgttattggcttttacggttacaagcaagcaactggtaacctaagcgagtacatgttaggtggacgtagtattggaccgtatattactgcattatcagctggagcttcagatatgagtggatggatgattatggggctacctggttctgtctatagcactggtctatcagctatgtggattacaatcggtttaacattaggtgcttatataaattactttgttgttgctcctagacttcgtgtttataccgaattagctggagatgcaattacattaccagatttctttaaaaatcgtttaaacgataaaaataatgtgttaaagattatttctggattgattatcgtagtattctttacattatatacacattctggtttcgtatctggtggtaaattatttgaaagtgcttttggattagattatcatttcggtttaatattagttgctttcattgtcattttctatactttctttggtggatatttagctgtatcaattacagatttcttccaaggtgtcattatgttaattgcgatggttatggtccctattgttgctatgatgaatttaaacggctggggaacgtttcatgatgtagcagctatgaaacctacaaatttaaatttatttaaagggttatcatttataggaattatctctctattttcatggggattaggttatttcggtcaacctcatatcattgtaagatttatgtctattaaatcacacaagatgctacctaaagctagacgtttaggtattagctggatggctgttggtttattaggcgctgtggctgttggtttaacaggtattgcattcgtacctgcttatcatattaaactagaagatcctgagacattattcatcgtgatgagtcaagtactcttccatcctcttgtaggtggtttcttacttgctgcgattctagctgcaattatgagcacgatttcttcacaattacttgtaacatctagttcactaacggaagacttttataaattaattcgtggtgaagaaaaagctaaaacgcaccaaaaagaatttgttatgattggaagattatctgtattagttgtagcaattgttgccatcgcgattgcatggaatccaaacgacacaattctaaacttagtaggtaacgcttgggccggatttggtgcatcgttcagtccacttgtgctatttgcactttactggaaaggtttgacacgtgccggtgctgtaagtggaatggtttcaggtgccttagtcgttatcgtttggattgcgtggattaaaccattggcacatatcaacgaaatattcggcttatatgaaattattcctggatttattgtaagtgtaatcgttacatatgttgtaagtaaacttactaaaaaacctggtgcatttgttgaaactgacttaaacaaagttcgtgacatcgttagagaaaaataattcataagtcttaacaaattaaaaaggtactaatgttaatcaaaattatgactaacattggtacctttttattatctttaatttacaattaattactgtaaatatgaacttgcggttctttgtcatcttttgtcttactaattaaagcacgtggttggttaccatctttaatacgaatttcatagttatcgattttatcgaaatatttattcgcttgttcagtaacgtactgtgtaataccaattgtttcagcttgtccatagtaatcgattggtaaatctactactaatcgttgtggctttttatcaacaaatttaactttccctactgcttgtgtgaaattagaaaaatatgattgcaaattatcattaaattgcttgaaattattatttaaattttcatcataatctgctgctgttgaagaaggtaataaagctgatttttcattgatattatgccattcattaagctttgtttgactcttttctgcagtcgcttgagtgataaattcacctggtgtgattgaatcttcacttgattgcttataaattgcaaaatgaattggtatatcttttaaatcatcattttcacgtaaccttgataatatctcactagccatttgtttaccttgctttttaacttcgctatcatctagttttttactaaaagtcgatccatctttttcttttttatagtaataaacactattcatagctaaaccaatcgtcatacctttaatattcttaccttttgtatctccaccaccataaaaatcttgctctaaaatgttagataaataggctggtgatttttctgcaatcttttcaggatctgtttcaccttcgtgtgatggattaagtcctaaattttcattcgctttcttgtcttttttatctttttcagacattttatcgatttcacgttttgtatacttaggatttaaataggcattaattgttttcttgtccaaaaattgaccatcttgatacaaatatttatctgttggaaatacttctttacttaagttcaataaaccatcttcaaagtcgccgccattataactatttgccatgttatcttgtaaaagtcctcttgcctggctttctttaaatggtaacaatgtacgatagttatcaccttgtacatttttatccgttgcaatttcttttacttgatttgaactattgttatgtttttgattatcttttccagcctggtcatccttatggttaccacaagcagcgagtataaagatagctgtaatcaataatactaatgtacgcttcatcgacatacccctctaactatttaattcattttgcttatctacaaattgttgctctgtccaaatttcaatacctaaactttgtgcttttgttaattttgaacctgcatcttcaccagcaataacgacatctgtatttttagtaacgctacttgtaactttagcaccttgtgatgcaagccatttagatgcttcattgcgtgtcatttgatgtagcttaccagtcagtactatcgttttaccactaaattcaggatgtccttcaatatctgatgttttgatacctttataaatcatattaacatgtttatcttttaatttttgaattaaagcacgaatatcttcattttctaaataagtaactacagattgtgctactttatcacctatatcatgaatttctactaattccgcttcagttaccgttagtaatcgatctatcgtttcatatttttctgctaacacttggctcgctttaacacctaaatgcctaatacctagaccaaataataaattttctaaagagttgtccttagcttgttgaatggcagctaataaattatcaacttttttctgccccattctgtctaaaggtaataaatcttcttctgttaaatagaaaatatcagcaacatctttaattaattcgctttgataaagctgttgaataattttagtgcctaaaccatcaatattcatggcttgtcttgatacaaagtgaatcaatccttcaacaagttgtgcttggcattttggattaatgcaacgaagtgctacttcgccttcaatacgtactaattcatgtccacaacttggacaatgggttggcatatgatatgtgacagcgtcctcaggtctacgttctggaatactacgtacaacttcaggtatgatgtcacctgcttttttcactacaacactatcaccaattcgaatatctctgtcatgaattaaatcctcattgtgcaaagatgctcttgatacagttgtaccagctacttttactggttctaaaatagcagtaggtgtgactacacctgttcgtccaatacttaattcaatatctaataatttagttactacttcctcagctggaaatttataagcaatggcccatctaggagatttttgtgtgaatcccatctcatcctgttgatctaaatcattaaccttaataacaatcccatcaatatcataaggtaatgactctctttggcttgtccatttttcaatatactctaaaacaccatcgatattatttacacgcgctctatttttattcgttgtaaaacctaatttatctaactcatctaatgcttcactttgcgaacgcgcattgaaatcagtgaaatcattgacactatatataaatacgcttagctttcgttttgccgttaatttagaatctaactgtcttaatgatcccgcagcagcgtttcttggatttgcaaataactgctcatcatttttttctttttcttcatttaatcgtaaaaatgaacgtctcggcatatatgcttcaccacgaacttctacatttaatggttctttcattttcaaaggtatcgcatgaattgtttttaaattttcggtaatatcttcacctgttgttccatcaccacgtgttaaaccttgaacgaagtatccatcaacatatttcaatgatactgctaagccatcaatttttaattcgcacatatattcaacgttgccaatttgttcacgtatgcgttggtcgaattttctcaaatcatcctcattaaatgcattccctaaacttaacattggcgtgtcatggttgactttattgaaagaggcttgggcttcaccgccaactctaactgttggagaatctacagtcttatactcaggatgctcctcttctattttaatcagttcatgaagtaatttgtcatattcactatctggtacagatggattatcctctacatagtattcataactgtattgatttaataaatcatgtaactcgttcacacgagacgataaatcagccatcccttaatcctcctttttttcaattggtgcaaattgcgctaacaaacgttttggcccttgtgatttaaagataatatctagttcgattgagccatttttctcgtttacattactcaccataccttctccccaagctttatgcatcactttgtcacctacattccaatcagatgacgatacttgttttttcgttgacgttgttcgttgactaaatccacgtttagcaaaaggttttgccttaggttgtatcgtttgtcgtttgccacttgaatgattttctaatagtgattctggaatttcctttaaaaatctagatggcatatttgactgagggcgaccaaataacattcttgatgtcgcatgagtgatatataacacctcttcagcccttgtgattgctacataacaaatacgacgttcttcttgcatttcatgatcatcttcactcttaatcgctctaatatgtgggaataaagattcttccatccccattataaagacgattggaaattcaagacccttagccgagtgcatcgtcattagtgttacgccattttcagtatctgcctcatcaatatcagctactaacgataaatccgttaaaaagttaattaatgactgttcttctaatggggtattttcctcatagtcttttggtactgacataaattcatcgatgttttctaatctacttcgagattctaatgtattttcacgttcaagcatttctcggtagccagacttttgtaatacttcatcaactatttcatgaatttctaaaaattcttgttcttttatcaagctttggattaactcgtaaaaattaagacactcttgtgtcaccttttttgacaatccgataaaatcagcttctccaagtgcatcaaacatactgatattgttttgaagtgcatagttttgaactttttcaacagatgaaggacctacacctctttttggaacattaataatacgttgcaaactaatgtcatcattactattggcaattatacgcaaataacttaataaatctttgatttctttacggtcatagaacttttggccaccaaccattgtgtatggcatattagatttcatgaatgtttcctcaagtacacgtgattgtgcatttgttctatataaaattgccatatcttgatatttcttaccattacgttgatgcttcataatttctcgtattacaaattccgcttcatcacgttctgtcattgcttcatagtaatgaattttctcaccattcgtatttgcagtccacagtccttttggcttacgttcagaattatttttaatcacttcgttagccgcatttaaaatcgttttcgtcgaacgataattttgctctaaaaagattgtattcgcttctgggtagtcattttcaaatgataagatattttgaatatcagcaccacgccaaccataaattgactgatctgagtcacctacaacacataagtttttaaacttacttgctaataatttaactaatgtatattgtgctttattagtatcttgatactcatctacatgaatatattggaatttgttctgataatattctagaacttctggtacacgctcaaataagttaatcgttgtcataataaggtcatcaaaatctaacgcttcattacgcgacaattggcgttgatatccactataaaccgttgctaccatttgcgagtgataatctgtggcttctttttgagcatctgcaggtgttttaagttcatttttcaaattactgatcgcaccgataaacatacgaggttcaaactttttactatcaatattttcattttttaagacgtctttaataacagatttttggtctgtaggatcaattatcgtaaaattgcgttctataccaattcgatctgcatcacgacgtaaaatacgaacacacattgagtggaatgttgacatccaaataacttctgcttgatcacctactaatttttgaacacgttctttcatttctcttgcagctttatttgtaaaagtaatagccaaaacattgtatggtgagacatctttttcgtctaataaataagcaattctatgtgttaaaacacgtgtcttccctgaaccagcacctgccataattaacaatggtccttctgttgtctttacagcttcactttgctctgtattcatatgatttaataacgcattcatttactagactcctttatttttactgtttttaaagcttttttaatatctttataaataatatcaccgacgataattgtatctgcaatagctgccatctctgtcgcttgttgttctgaggaaataccgccaccataaaaaagttgcgtttctgttagatgttctgagacagcttgaacctttgatacgtcgccataaatgccactatactctatatacataaccggtaatcgatacatatgattgaccatttgggcatatgcttctaaatcttctgttgttaaatctgtatttgctttggtatgttttgccactttgctatcagcattgcacacgacatacccttcaaatattacttcttcaaaatctatactatgtccatatgttttaagcgcttctaataatgtaccattgtgaaatgcaacatctgtactgttcagtactgtaggtacaaaataaaaatcaaaaccaggcattacactttcgatgtttgatatttcaagtactaaaggcaatgggtatcttcttactctgctcattaaatgaatgacattatcttcagtaacgtcatcagttccaccaatcataattgcatctgtttgagacatacaaatcgcatctaaatcatcatctgaaatatgtttagctgggtctaatttaaaaatatggcgccattttttaatgtcatacattttccgaaactccttttttaacatacatatgattatagcatttttaagtgtcgagttctaaagacttaatatgaaatttaagttcttttactctgtaaattttttcgtgaaaaaacaatgattatctaccttattagtgcagatagataaccattgtttatcgttcatttattattcatttgtttcaatattcatacgatctaaaatcattgtataagcatcattaccccattgtaatgaacgcttcactctagaaatcgttgcagtcgatgctccagattcttgttcaatcgttgcataggtataaccttgcttaatcattttagcaacttgtaatctttgagacagtgattgaatttcatttacagtacacaaatcatcgaaaaattggtaacattcttctctattttctaacgttagtattgcatcaaacaattcatctaacgctgcacctcgtaatttttcaatttgcatatcgaaacaacccctataattttattctttatgtcattttaacgcattaatctattaaagtgtagcgatttatattttattaaatctgaatcgttactttatttaattttatgctaatccagcgcgttcgaaaatagtgtcaacttgattcaaatgatgtttaggatcgaaacattcatccaattcttcttttgttaaaacacttgtaatagactcatcttgttcgattaattcacggaaaggtgttttcgtttcccaagatatcatcgcttttggttgtactttgtcgtatgcttcttcacgaaccatacctttattaattaatgctaataagacacgttgtgagaaaatcagaccaaatgttttatctatgttattacgcatattatcttcaaatacagttaaacggtccacaatatttgtgaaacgattcaatgcataatctagtgctattgtaacatctggtaacataatacgctcagcagaagaatgagaaatatctctttcatgccataatggcacattctcataagctgtagtaatataaccacgaatgactcttgaaatacctgtgatattttcagaaccaattggatttcgtttatgaggcattgcagatgaacctttttggccttttgcaaatgcttcttcaacttctcttgtttcggttttttgaaggttacgaatttcaacggcaaatttttctagtgacgtcgcgattaatgctaatgtcgcaatatagtatgcatgtcgatcgcgttgcaatgtttgcgttgatacaggcgctgtgccaatacctaaatgtttacacacataactttctatttcaggaggaatgttagcaaaagtacctactgcaccactcattttccctacttcaatttcttctcttacttgtttgaaacgttgtaagttacgttgcatttccgtgtaccacaatgccattttgacaccaaatgtagttggttctgcatgcactccatgtgtacgtcccatcatcaatgtatatttataattttttgctttttcagctaaaacgtcgataaatctttctaaatctttttcaataatgtcatttgcttgtttaataacgaaacttaaagctgtatctacaacatcagtagaagttaaaccataatgtacccacttacgttcttcacctagcgtttcagaaacttgtctagtaaaggctacaacatcatggcgcgtttcttgttcaatttcttgtgcacgttcgacatttacctttgcgttttgacgaattttttgtacgtcagctttcggtatatgtcctaattcactccatgcttcacatgctaaaatttccacttctaaccatgcttcatagcgattttgatcagtccaaatattagacatttcttctctagaatagcgttcaatcatttttttaactcctatcgtatgtatactcgaattttcaaaaacagaacatttttaataaaaataaataaaaagttcgtttttaactctactcttcacagtttaacagaattggttataaatgtataaaaaatttccgtatattctcattctattttattttttacattaatacaattatctatggcagattaatactgatttctaattgtaaatgttcgcaatactttaatctaattggtatttataatgatccattaagaatatatttttgcattttagtttttctcccctcaactacactatccaactttttattacaattaggacaatcaatagctttagtaataccagaatttattcactttacttctcctattgtatggaattttcaacaatctacttttcctagtttcataatatttcttcttacatttcataatatgttttaaaattattcgcttctaatataacaaattttctactcacaaaaagaatatatattctattgcataggtgtggcattttaaatataagacattaatattgaactccagaatcgtataaatacgaaactgattatagaaaaatacgcagagatttttttaatagtaaatttttatagaaagacataaattgactacgcttctttcaaaatcgactaatatattttcatgaaactttcgatcatattaattattgaatgagatgtttgcaatttagtaaataagctactaaattattacataaactgataatgtgtaaaaattaattattttttaaacatagattaaaattttatattgaaactcttaactaaatttaatataattattttataataaaataaaggagtttttatatgaaaagaaactttccaaaattaatagctttaagtttaatgttttctttaagtgttacccctattgcaaacgctgagagcaattcaaatatcaaagcaaaagataagaagcatgtgcaagttaatgtcgaggacaagagtgttcctactgacgtacgtaatttagcgcaaaaagactatctttcttatgttacttcacttgataaaatctataataaagagaaagcctcgtatacacttggtgaaccttttaaaatttataaattcaacaaaaagagtgatggtaattattattttccagttttgaacactgaaggtaatatcgattatatagttacaatttcaccaaaaatcactaagtattctagttcatcttctaaatacacaatcaatgtttctccatttttatctaaagtcttaaatcaatataaagatcaacaaattactattttgacaaactcaaaaggttactatgtggttactcaaaatcataaagctaaactagtactaaaaacaccacgtctagaagataaaaagttaaaaaagactgagagtatacctactggcaataatgtaacgcaactaaagcaaaaagcttctgtcactatgccaactagtcaatttaaaagtaataattatacttacaacgagcaatatataaataaacttgagaatttcaagataagagaaactcaaggtaacaatggttggtgtgcaggctatacgatgtctgcattactaaatgcgacttataatactaacaaatatcatgcagaagctgtgatgagatttttacacccaaacttacaaggacaacgattccaatttactggtttaacgccaagagagatgatttattttggacaaactcagggaagaagtccacaacttcttaatagaatgactacatataatgaagttgacaatcttactaaaaataataaaggaattgctgttttaggtagtagagtagaatcaagaaatggtatgcacgcagggcatgccatggcagttgttgggaacgctaaattagataatggacaagaggttataattatatggaatccatgggataatggttttatgactcaagatgctaaaaacaatgttattccagtatccaatggcgaccattatcgatggtattcatctatttatggttattaaaatttgtattttagaaaggtaaataatattatggaacaaattgaattatttagtattgataaattcaaatgtaattcagaggctaagtattatcttaatattattgagggagaatggcatcctcaagatttaaatgatagtcctttaaaatttattctcagtacctcagacgattctgattacatttgcaaatatataaatacagaacacaaacaactcacattatataataaaaataatagctcaattgttattgaaatatttataccaaatgataataaaatactactaacaattatgaacacagaagctttgggaacttctcctagaatgactttcattaagcataagtcataagactatctagatatgattaagtaaactattaatcttattaaaggtctctaggaagaaaaaatttcatgcgatgagattgttttagaaaaagcgacgatatatataatctaacaataatttttaaaatattaagaacccccagcatatgctttatatagcttgctggggatttctcatacaatatggatcgagcatcttgcatgtataaacaaataggctattcaaagtaaaattactcaaactttgaatagcctttcctcttcaaatagtctttatttaaattggattatgttattggattttcttacctacaaaaatgatttcttgatgtgatacttcaaccgtgccatctttttgctcttgaaacacgggtttttcaatacgttttaccggcatatacccttgcattttcattcgtgacaaacaatcagcaattgtttcattctcatttactttgaatttcatgttctactacactttccagttcttctggttcataatctttaagctttctacgacgaatgcctttagtccagaatccaccatgtatgtttcgaggttcatacgcaatgataaatgctttcggatctaaattttttatcgtatccatcaatttacgttcatattttcttggtgttaaaatttgcatcaccatacgactaccatctctaccaaacgcagcatagtgcgtaacgccatatcctaaatttcgaagttcattcggtaaatctaactcatattctgctgaagttacatttacaactgtataacctaatgccagtttttcttctattttcataccaacaatgatacctattgaaaaaccaaatgcgtaggcaataatattttgaatatggtctaaattagacataaccaaacctaaaccaacgatataaactaatacttctaaaaaactaactgatgcagcaatataacgataacctttcaacgttaaaattgttcgcatcgttaaaaacgttacataacaaacgttaatgataaatatagttagtaccattaaccatggattttctgttacgaatgacataaggcgccccactctctttcaattacactttaaataccaaactgcttcaaactaaccttaatgaatgcatattaatataatatagtacgaaaactctcataaataaatagcgaatttgtcataaataaaaatttattctcaaatgaacatacttactttagttcatacactttcaatttatacactgaagtagtctagctgaatgtggtttaatgttattaattctaactcatatttaatttaagtcacacgttagaagaaaaaattaaattaggattttggccacgtgtatcttgtatatgcaagttcacgtttgtgtgcatttcgtatataatgattttcaattactttttgttcttctggcgtaactggcttaccttctaaataattatcaatcgcctcataagttacacctaatgcatcttcatctggaagctgtggtttatcatcttctaaatcagcagttggcgttttttcatataattcctttggcgcaccaagatacgctaataattgacgaccttgtcgtttattcaaaccaaatataggtgcgatatctgcagcaccatcaccgtacttcgtataaaaaccagttatattttcagctgaatgatctgttcctactacaataccttgtcggtttgaagcaattgaaaattgtactttcatacgttcacgcgctttttcatttcctttttggaaatctgtaagaacaataccggcttcttttaatgattgcacactttgatcaactgcaggcttaatattgactgttactatttcatctggttcaatgaatcgcaaagcttggtcaacttcatcagcatctttttgaactccataaggtaatttaactgcaataaacgtacaatcaatgccttcttcacgtaattcgttaacagacatttgtactaattttccaactaatgtagaatcctgtcctcctgaaatacctaacactaaagattttataaatgaatgtgattgtacataattttttatgaattgctttaattccataatttcttcagcactatcgatacgctttttcactttcatttcttgtacaataacgtcttgtaatttactcattatcttcttccatctccttaacgtgttccgcaacttcaaaaatacgtttatgtttattatcccaacatgccttgcttaaatcgactggatattcttgtggattcaggaaacgcttattttcatcccaaatagattgtaatccttgtgctaaatattcacgtgattcatcttctgttggcatttgatatactaatttaccattttcataaatattatgatgcaaatcaatggcttcgaaagattttataaatttcattttataagtatgcactggatggaataattttaaaggttgttcatcgtatggattttcattttccaaagtaatataatcgccttctgctttacctgttttcttgtttataatgcgatatacatttttcttacctggcgtcgtaaccttttcagcgttatttgataatttaatacgatcactatatgaaccatcttcattttcaatagctacaagtttatatactgcacctaatgctggttgatcgtatcctgtaatcagctttgtaccaacgccccaagaatctacttttgcaccttgtgctttcaaactcgtaatcgtttcttcatccaaatcattagacgcgataattttagtttcagtaaatcctgcttcatcaagcatacgtcttgcctctttagataaataagcgatatctccagaatctaatcgaatacctacaaagttaattttgtcacctaattcttttgcaacttttattgcatttggcacgccagattttaaagtatggaatgtatctactaggaacacacaatttttatgtctttcagcatattttttgaaggcaacatattcgtctccataagtttggacaaatgcatgtgcatgtgtaccagacacaggtataccaaataatttccccgccctaacattacttgtagaatcaaagcccccgatgtaagcagctctagcgccccacaatgctgcatcaatttcttgcgcacgacgtgtaccaaactccattaatttatcatttgatgcaatttgacgaattctacttgcctttgttgtaattagtgtatggaaatttacaatgtttaataaaattgtttctattaattgcgcttgaatcaatggtgcttctacgcgtaacaatggttcgttaccaaagcataactcgccttcttgcatcgaacggatgcttcctgtgaattttaaatcttttaaatatgataagaaatcatccttgtagccaatagactttaaatattccaaatcagattctgaaaatccaaaatgttctataaaatcaatgacgcgttttaaaccattaaaaacagcatagccactattaaatggcatttttctaaaatacaaatcaaatacagccattttttcatgaatattatcattccaataactttcagccatatttatttgatataagtcattatgtaacattaaactgtcgtcttctaattggtacacttgtatctctccaatcgacctaaatattttcttacattttatcataattcatttttttatatacataagagccccttaatttccatacttttaattaaaatcaaccaacaatttaatgacatatacataatttttaagagtattttaataatgtagactataatataaagcgaggtgttgttaatgttatttaaagaggctcaagctttcatagaaaacatgtataaagagtgtcattatgaaacgcaaattatcaataaacgtttacatgacattgaactagaaataaaagaaactgggacatatacacatacagaagaagaacttatttatggtgctaaaatggcttggcgtaattcaaatcgttgcattggtcgtttattttgggattcgttaaatgtcattgatgcaagagatgttactgacgaagcatcgttcttatcatcaattacttatcatattacacaggctacaaatgaaggtaaattaaagccgtatattactatatatgctccaaaggatggacctaaaattttcaacaatcaattaattcgctatgctggctatgacaattgtggtgatcctgctgaaaaagaagttacacgcttagcaaatcacttaggttggaaaggaaaaggtactaattttgacgtgttaccactgatttaccaattacctaatgagtcagttaaattttacgaatatcctacttcattaattaaagaagtacctattgaacataatcattatccaaaattaagaaaattgaacttaaaatggtatgcagtccctatcatttccaacatggacttaaaaatcggtggcattgtgtatccaactgcaccctttaacggttggtatatggtaactgaaattggcgtacgtaactttattgatgattaccgttacaatttactagaaaaagttgcagatgcgtttgaatttgatacacttaaaaataattcatttaataaagatcgagcacttgttgaattgaactatgctgtgtatcattcctttaaaaaagaaggcgtatcaattgtcgatcatttgaccgctgcaaagcaattcgaactattcgaacgtaacgaagcacaacaaggtcgtcaagttaccggaaaatggtcttggctagcaccgccattatctccaacattgacgtcaaattatcatcacggatatgacaatacagtaaaagatccaaactttttctataaaaagaaagaatcaaatgctaaccagtgccctttccatcattaagttagtagaggtgtagcatatgcaattatattatttaggccctaaaggtacattttcatatttggcttgtcgtcagtatttttctgaaaatgaagcaacttttcaaccaaagtcaaatttatttgaagtcatcaaggcagttgcagatgatgacacatcgattggtgttgtccctattgaaaattctatagaaggaacaatcaacattgtggcagatgcacttgcacagcaagatgtctttgcacacggtgaaatacgtttagatattaactttgcattatatggtaatggaacagattccatttctgatattaaaaaagtgtattctattgcaccagcaatcagtcaaacaacaaattacatacatcaacatcaatttgactatgattatgtcgacagtacaattcaaagtttgactaaaattgaaaatggcgttgcagcaattgcacctttaggtagtggcgaagcttatggttttacacctattgatacacatattgaagactatccacataacgtgacacgttttttagttataaaaaatcagcagcaatttgatcaaaatgcgacatcattgatgtttttaattacaccaatgcatgataaacctgggctgttagcaagtgtgcttaatacatttgctttgtttaatattaatttatcctggattgagtctcgtcctttaaaaacacaattaggtatgtatcgatttttcgttcaggctgattctgcaattacaaccgatataaagaaagtcattgctattttagaaaccttagatttcaaagtagaaatgattggtgcttttaattaaactttattttctaggttctacaatttaaataaaataaagagtcaaccaaggattaaaataggaatccatccttggttgactttcttttgtttgtattgtttttacacgatgctgcggtatacgtttcattaccactcgttcaagcaattgctaatgtaaccttttatttttcgttctaatctgcaattactatttcaatggcagtggttgatttatatcaatacctaaaactataggcattacataatacacgactaaaataataattattgcactgattaagtttacccagaatcctactgatgccatttgtttgatagatattttacctgaaccaaagataattgcattcggtggtgtccctactggtaacatgtatgcacagttagccgccatagctgcaggtgccataagtagtaatggatgcactccaacagcaacagacaacgttgctaaaatcggtaaaatcatcgttgcagttgcagtattagatgtcacttcagttaaaaataagacaaagattgttatgacaattacaataagaatcggactaacaccatttaatgatttcaactgttcgcctaaccattttgctaaaccactttcagaaatacctttcgctaatgctaaaccgccaccaaataaaattaatacaccccaagggagctcttttgcaacttcccagtcaatgatacggcgatgtttttcagtatttttagctggaataataaataataatattgatataaaaatagcaatcgtaccatctgcaacagatgacgtaacttcccattttttcagaagaaactctcttgtaatccataataagctggcaagtacaaagatagtttgtactaccttttcttcatacttcattttgccaagctcgtctaacttttgtttaattaacgtctgaccaccaggtaaatatttcaaatcatgtctaaacgcaacatatcttaaatagagccaagtaatacctaacaaaacaatgaccgttggaatccctacaatcatccatttagcaaaactaatttcatgtccaaaatgttgcatgtattgtccttttaaaataattaatggcggggttccgattaatgtacccaagccaccaatcgtacctgcatagccaattgctaaaactagagatttttcaaacttttgaatacttgtttgattcgtattggcttcttgtaaatcatgtgcttccttaataattgctaaaccaatcggaatcataatcattacagctgcagtgttcgatacaaacatagataagaatcctgttgccaccatgaatccaagtaatatttttgaagtgcttgcaccaattaaattaataatagtcaaagctactctcgtatgtaaattccatctttccattgcaattgccaaaataaatccacctaaaaacaaaaagataatatcattgccatattcggatgatacttgttctggtgtaagtatgtgacctaatggtaataacacaattggtaataagctcgttgctgcaataggaattgcttcagtaatccaccaagtcgcaatccataaagtaatcgctaagacatatacgcctttccaaggtaagtcttgtggatgaaagaacaataatgttaataggaaaagtaatggacctaatattagtccaataagttgtcccgcactaaacggtttctttttctttgattttgaaaagaatgttaaataccttttcgatatcattgattgatgttgattgaaataagccataaatttccccctcatgatgattatgacaagctacttcaactcactatattagagtatagaaagttgtctatcttgtattatcattaccgtcaaaataccccttttatcagataattgggtttattatagcatatttataccgttttatgaatgcgctttcaaaaattatctactattcttaatcctaatgtcatgcgaaactttttacttttttatttcatctatattgattgtagtaacttgaatacccgcttcaacaggacttaaaaacactgtatcaatatcttctaaatgaattgattgagtcgaattattgaatgtattcccaacgattaatacatctttatgtttaacattattataattacgtacatgtatcgcatctttagacattgatcctttaaattcatttccaattatattcatatttatgcctgcttgggaacctaagtcttttcctgtcatcacatctgctgcatttttaccatctctaactcctaaatatctaataccaccctcacagttaataaacttattattaataatgaaagcatctttatacttcaagggagttaatgcataaccttgtatatcttcaaatatattatttctaatatgaatattctcatagtaacgattatgtctacttgcatgtgagccaatagcacgattccaacttcccatttcgggcaattctgaaggtccaaaataacaatcttcgataacgacatttttcgttatcgtaccatctgtcgttccgaattttggaaaagcaccaggtacttgaatgtctaattgtattgcttcagaataaaagcgttcgccactatagtctatgaatccttcaaatgaacagcttttaatatagagtccgttaatcccacaagcatcaattgcatgaccactcactacattcttaatggtcacacctattaattgaatatcttcagcatgcccaatgcacatagctgtattgttataaggatacgatacaccattcatatcaaacttgccgcctttaatatgaatatgactgtgtccattataaccacgataaaaaccaaagcgatgaccattttttaataaaggaccagaatgacatcggcgtaaaatagtttcattatctaacaaaagtgttgtattgccatatatcgttaatggtttgcaaatatcatacgtccctttcggtatataaactgtcgttggtttacatcttccacgatttaacgcacgttgtattgctcgagtatctttagttttgtttatgcctgttaacccataatctttcatattgatatacataaatcgtcatcctttgtctattttctaattactcatatattaaccaattattcaaattataatcgtgttaggttgatttagcagatagtcataaatctcgtgatgccatctattagcatttttatattcaaaacatcaacacttgatattagttctaagtttgtcacatttagtattctattacagctattttaaaactatcgcaaaaacttcttatattatttgttgattgcgtgatttgctcttccaaaaaagttgattaatctatatacttaatctatatttatatattaaccattagggttaaaaattactctagcatttatgaatagatgggagtttattttattattatataggagagatgttgaatgacacatcgcgcactattagttgttgactattcatatgactttatcgcagatgacggcttactaacatgcggtaaacctggacaaaatattgaagattttattgtttctcgtatcaatgactttaattattatcaagaccatatattctttttaatggatttacattatttacatgacattcatcatcctgaaagtaaattattcccaccacacaatatcgtagatacaagtggtagagaattatacggtaaagtaggtaaattatacgaaacaattaaagcgcaacctaatgtacatttcattgataaaacgcgctatgattcgttctttggtaccccgcttgatagtttattgagagaaagaagtattaatcaagtcgaaatcgttggtgtatgtaccgatatttgcgtgttacatacagcaatttctgcatacaacttaggttataaaatttcagtacctgctgagggagtggcttcatttaatcaaaaagggcatgaatgggcacttgcacatttcaaaaactcattaggtgcagaggtagaacaacacgtttaaatcgtgctaaaataattataaagaatacaatttacaagggagatatttgacaatggctaaaacatatattttcggacataagaatccagacactgatgcaatttcatctgcgattattatggcagaatttgaacaacttcgaggtaattcaggagccaaagcataccgtttaggtgatgtgagtgcagaaactcaattcgcgttagatacatttaatgtacctgctccggaattattaacagatgatttagatggtcaagatgttatcttagttgatcataacgaattccaacaaagttctgatacgattgcctctgctacgattaagcatgtaattgatcatcacagaattgcaaatttcgaaactgctggtcctttatgttatcgtgctgaaccagttggttgtacagctacaattttatacaaaatgtttagagaacgtggctttgaaattaaacctgaaattgccggtttaatgttatcagcaattatctcagatagcttacttttcaaatcaccaacatgtacacaacaagatgttaaagcagctgaagaattaaaagatattgctaaagttgatattcaaaagtacggcttagatatgttaaaagcaggtgcttcaacaactgataaatcagttgaattcttattaaacatggatgctaaatcatttactatgggtgactatgtgactcgtattgcacaagttaatgctgttgaccttgacgaagtgttaaatcgtaaagaagatttagaaaaagaaatgttagctgtaagtgcacaagaaaaatatgacttatttgtacttgttgttactgacatcattaatagtgattctaaaattttagttgtaggtgctgaaaaagataaagttggcgaagcattcaatgttcaattagaagatgacatggccttcttatctggtgttgtttctcgaaaaaaacaaatcgtacctcaaatcactgaagcattaacaaaataatactatattactgtctatttatagacatgttgtatttaactaacagttcattaaagtagaatttatttcactttcaatgaactgttttttatttacgtttgactaatttacaaccttttcaatagcagttttcattcctttagctatcctaacccacagattagtgatttctatacaattccccttttgtctttacattttcttaaaatatttgcgatgttgagtataaatttttgttttcttcctacctttttcgttatgattaaagttataaatattattatgtacacgattcatcgctctattttcaactttcaacatatataattcaaaagaacatttaaaattaacggccacaacattcaaatcaattactcacttttccaaaataatcatataaggaggttcttttcattatgaatatcattgagcaaaaattttatgacagtaaagcttttttcaatacacaacaaactaaagatattagttttagaaaagagcaattaaagaagttaagcaaagctattaaatcatacgagagcgatattttagaagcactatatacagatttaggaaaaaataaagtcgaagcttatgctactgaaattggcataactttgaaaagtatcaaaaatgcccgtaaggaacttaaaaactggactaaaacaaaaaatgtagacacacctttatatttatttccaacaaaaagctatatcaaaaaagaaccttatggaacagttttgatcattgcaccatttaactatccttttcaactagtgttcgaacctttaatcggtgctattgcagcaggtaatacagcaattattaaaccatctgagttgacaccaaacgttgcacgagtgattaaacgattaatcaatgaaacatttgatgcaaattacattgaagttattgagggaggaattgaagaaacgcaaacgttaattcacttaccttttgactatgtcttctttacaggaagtgaaaatgtaggcaaaatcgtttatcaagctgccagcgaaaatttagttcctgtgacattagaaatgggcggtaaatctccagtcatcgttgatgaaacagcgaatattaaggttgccagtgaacgcatttgttttgggaaattcactaatgccggccaaacatgtgttgcacctgattacattttagtacacgaatctgtaaaagatgatttaatcacagccctatcaaaaacgttgcgtgaattttatggtcaaaatatacaacaaagtccagattatggccgcattgtaaaccttaaacattatcatcgtctgacgtcattacttaacagtgcacaaatgaatattgtatttggtggtcatagtgatgaggatgaacgttatatagaaccaacattgttagatcacgttacaaatgattcagcaattatgcaagaagaaatttttggtcctatcttaccgattttaacgtatcagtcattggatgaagcaatagcctttattcaccaaagaccaaaacctttgagtttatatttatttagcgaagatgaaaatgctacgcaacgtgtaataaacgagttatcatttggcggcggcgctattaatgatacattgatgcacctagcgaatcctaaattaccatttggtggtgttggcgcctcaggtatgggacgctatcatggtaaatattcattcgacacttttacacatgaaaaaagctacattttcaaatctacacgattagaatcaggtgtccatttaccaccatataaaggtaaatttaaatacatcaaagctttctttaaaaattaatttttgagacaaaaataaaccatgcttccataatttgatgttcttgaaaacaataaatttcaaggtatacacaaattttttggaaacatggttttctttttatcatgattaattaaagattaaaatatgacacatacaccttcagatgctacacgagtgttatcacatagcgtaattttacctgtttctttatttctttcgaaaacagttacaactgaatctccttgctcatgagcacaaactaaaaggtcatctgatgaggcaatattaaaatctcttgggaattgaccaccactttcagtaattgttactagttctaagtgttgaccattatcaagaactttaaaaattgcaatgctatcatgccctctattagatacatataagaattgttgatcatgagacaaacgcactgctgcaagtttagtatctccatcaaagttttcaggaattgttaaatgacgctcgagctcttcaaatttaccgtcattatattctgcaacgctcacagtatttgataattcgtgtacgacataagcaaattttccattatcatgaaattcaatatgtcttgtcccatcactatctttaaataaagattctttataaaattcaaacccgttgtcatcaaatttataagtaacgatacgatcagcacctaaatctgttactgcaacgtacttaccatctggagtttgattaatataatgtgcgtgtggatgatcttgtctttcatgtgtacctgttggaaaatcatgtgcaagttcttgaattagacgtataatttcacctgtgtgcgtatttaattcatacatacgtatgatgccagcaccatataccgcttcaaataaatatcgtttatcttctgaaatcgatacataacaacctgtaccagcttttgaagacaaacatttatttaataaatgcaattcaccattgtcatcaattttcaaacttgcaacaccgcattgttctccttctttgttgattccatataaaacttcattattacgcaccaaatatgtagacgcttctaattcaaatcctgtttctaataaatcaatacgtgactgattttcgtttaattcaaaacgataaatccctttaccattctttttagtgtaagaaccaatatatccatttgtcattacttttacccctccatgttagtcttattttcattttattaaattttagctagaattaacaatcatttatcatttccttaaagctaaaactatttaactactttaaaagaactatttgctgtgatatgtcattattcgattttaattaatccctcttttttacttacacgagcattaattattaacgcgtttatgcttccacaaaatttttgttgcaaaatagaacacatgttcgtataatgtaattatcagattggggtgaattaaggatgacaagttatgaagaagaaactgattatcgtaacgttccaagagaattactagataacaatatacctatgggaagaggcatgattaaatgggctccttttgcaacattacccgaacaattcgaaacgattcaacaatacattatcgaccaaaacaaaattacacgtcctgtattatcagatgatcaattggctgagctaaacattcggctacacgaggcgctacaatatgcccaacctgtagaagttaaattttataataatggctttgtagattcagtacgcttaaccatttatcgtattgatgctattaattatgaaattgatggttatgtttacaatcagcaacaacgtcaaaaaatttctatctttgatatcttagatattgtcttgttaccttaatgctttgaacataattaaaggcaagaacaatctatattgtccttgcctaaatgttattagttatttttactttcgatatcagaaataatttctttagtttttctttcaatatcttcaaaatcttttttaaagatataagcaaatgctactacaccaacaccagcaactaatgttgtaatagcaactaagctaaatacgaatttaaacacacatttaataaaattccacatctcaatttcacctctgttaaattaaatacctatctacatttcattatactatcatatatagaataatcattaaataaatacccacttttacgaaatatattcatcaaattatatagcgagcaagctaatgattattttcaaaaatgccgaggaacctctgtttcaacgtgacatgaccttatatgctaatgttaacaatgactattatcgtgaatgctaacttaagattgttatttatgataagatgattttaagtttttaacttaatatccccaccatctataaaaatatgttttaactgattgataagtcttatacaccgagaaatcacctcaaacaattttatatttcatttagtaaaatataactttatttaacatgacattcaatatacatacgattactatttatttacaatatattacaactaaaaagaaaggggccgatgatatgcaacaagtgacatcagatattatgacttttagaggttcacatttcgagttaggtgttaaaactggtaaatggcttcaacaaacacctcttctaaaaaatcgagaaaaagaatggaaaaaacgtgtcccacgtttcgatatagatgtaaatgaaacttatcaaatattccaaacatacgcacctcaaatatgggaagaattaatgggactacaaagtatactcaaaatgccaacacgccaaattattttaaactttggacattatcgttttaccgatttaaaagaaagtggttgcacggtctttcaaggcaaagacttcatggttagaaattatgattaccaccctgcaacttatgatggtcgctacttactttatcaacctacagatagcggtttagctcaaattggtcctgtatcaagggtaactggaagaatggatggtatgaatgagtcaggattaactatgggctataactttatgcaccggaagaaaccagcaaatggttttgtatgttatatgattggtcgtctaattcttgaaaattgccgaaatgtaacagaagcaatccaattattgaaagaaataccacacagaagctcatttagctacatactgatggacaaatcattgaaccatgcaattgttgaagtgacgccgagatcaatagatgttcgttatgataatatatgtacaaatcattttgaaatattaacacatgaaaatcgcaattatacaaaagaatctaaagaaagactggcgcgtaccatttcacaaactaatgataatttagatatgactacagcatttaagttattcaataatcctcagtatgaaatttacagtaaactattcaaaagctggtctggcaccatccatacatcaatgtatcaccctgaaacattaactgcatattttacattgggagaaaatgcgccaccagaaataatagatttcaaatcatggttagatggtcaagaccttaatatcactcactttactggcaatatagataccgacttaacttttgccaacaaataaataacaccgatattagagaaattatgcttcctaatatcggtgcttacatcctttatttattcaactttgatattaccatcaatcgtataaaattctaaaacattgtcgcttttcccaactttaccattagtaaatgttttatttttaactacgctatcacccgttcccggatttagctttagtatagtgtcttcaggtttactatcatacttaaaaagaatatctccttgtttagtagaagcttttgcatctacttttgatggcatgtttttaaattcaatgtcaccatgatcatttaaaaatatggattgtttaatttgactcttgtcgatttgtagcgtaccaataacaactttaatattgctatttttaatgttacttttactaatataagtagaactattatttgtctttgaatctagtgcgtcaagatttgagtttttaataactacttcaccgttaatgctttgaatacttgtgttctctaaatcaacatcactgattctaacacttcctgccccagatgatagatttaaacgtttaatcattttatcaggcatttcaatcgttaacgttttcttattctcatgaaaaggattcatatcaattgcatatcctcttgtcttagaccttttatcactaatcttcaacgtcttatctactatattaattaatatatcattgtcaccatcatatttaactctaaattgattcccccgttttatacgaagttctgtactatccaaatttatagatacattgtcaaaagcatcgtctttgaatgttttatcatattgtttagtaccatatttgtttttatcatagctgaaccaaataatggttgctgctgtaaaaaagacaacaaacactaaaagcccaataaaaaagaatttcttcattttctaacgcttcctttgacagttttaatataccaaagtaaatattttaagattaaacgataaatgtattctaaaatcttaaatatgacaatgataaatactaatcctaatcctgaatatgatatggcaaaaaatacattactaattgagtccacaattcctctggatattgctgatgctaataaaataattggacaaaacagcagcaaaagtgatattaaaaataatgctaatacaaataatccaactatagatactggtataaggatgacaaaaatagatagaatgcctaaacttaatgaagcagcaacagctcttgaaatattttcaaatgttggtttagattcagcataatcaataacacttctagcttttgtttcagctgcaacatcttgtgggtcttttaacttctttaaaatttccccttcatcaacgccattaagttcttgctcataaaaataacgttcatattcatacattttttgatctcttaaatgcctaggtagcgcatcaagtgctgtttctaattcatttaaataagtaatcttgttcatataggtcactcatcccaataaaattattcattcgttttttataactttaagacctaaagctatttactaaaaaattcaatacgtttaatttctaaatcttgataaagtaagtttaattttaaatggttatctctatcaatatactttaccgatgagaaatcattgccaacttttgttcttttatatccgaatccaagattttcaatcgcgttatttatcggcgaaccaattcccccatcaaaattagtatgtatcttttcatctcttactaatattatccccttaacgatgttatccttttctctcactttaacggtaagatcagggtgagctttactgttataaaatttaaaacgatcaaacttaatttttttatttacttcatagccttttttatcaaacttctcatttaatttaatatcgtttatttcaagattagacaaatccacagttttcgtatgacgatattgatataaaccaattaatacaccaaaagaacagattaaaaataatataaacacaacccagcgattttgaatacgcactgatgtcaccctttctttgtacttatttaaatatagcataaggtgcttcccgtttcatccttaacaaaaattaacaaagaatttgcaattaatttatttcattaccttttattactataaattggtataatgttgtaaatgctaaaggaggtttttacaatgacaaatttagaaacttatttcaaaaatagccaacccttaaatgaatacattgatggaatgaagacaaatcaagataccgttctcagtatctatcaatcatttgagttaccagaagatgattcacgcatcaaaaaaataaaagagatgaattattctaaagtattagtaattactgaagactggtgtggagatgcaatgatgaatctcccaattctaaaacacatcagtgaagcattaaatttagaagtacgcgtgttccatagagatgatgatacaaaactgatcgatcaatatttaacaaatggtaaatcacgtgcaattcctatcttcgtattcttgaatgatcaattcgaacaagaaacagtttggggaccaagagcaaatgaagtccaaaaatttgtaactgatgttcgtgctgataaattaccgagcaaagatcatccagactatgcagatttagaaaaagaaacacacttagttatatcaaaccgctataaaactgacgcttcattttggaaagcagtttataattccatcctaaataaattagaaaataaataaatttacaataagacaaactttgaggttgggaaaatttaaaattcccaacctcaaaattatttttattaaatgtcttttttagcgacatataagatattcaaaatgaagaatatcactatagaacctaatgaaattacccattgccaattgctaaaatcaaagttagagctaatcattttatcagttaagtaagcaaaagggatataatcaaaagcatctaaaactttttcaccgtatcttgggataaatgtaataaaaggtttaataaacggtacaatgagtactaaaaatacacctaatgaaaatatcattgctgttttttgtgatgcaagtgtgattaagaataaaaacaagccaaagaatagtaaaaagattaggaagaaccataaattatctacatatttagaaaacgccaaattttttccattactagatgcctgcacaacaatcaaaatcacataatgaattaatgcaaataatattgaaattaaaataattgaaattgttttcgaaataatgtatccaacgcgtgttttaactttactcatatatagttgaattgtaccttgtgaaaaatcacgcgtaattgtcttaacaacaaacattaatccaattattaacaataaccattttgctgcagcaaatacagatccatagacaataatatgtttcgggttatccatcgaatttgccataagtatactttgagttgcaatcaaactagatacgactagtatcgctaaatatgttaaaggacttttaaatatactataaaaatcatacttaactaaatttaaaattctcattatttatcacctctttgatttatattgaagtacgtatcacgcaatgaacttttacgtgtttcaatatatttcggataaatatctaattcagataatgcttttagtataacttgataatttttttgtgcattgatcattaaatgtccgtctgctttgtcgatattttgtaattggaaatgctctgcaagatatttttcagttctatcaaagtctttatgatcaacagtaactatcgttgtgtcagatgcaacaccttcctccatgtttacatcttgaacaaaatgtccgtctcttaaaaatacagctctatcacaaattaattcaatatcttctaacttatgacttgatattagaattctcatatcaagttcatttactaaagacttaattgtagtcagcacatcaattgagccatctggatccataccatttgtaggctcatccaagattaaaaatttaggtttattcattaaagatactgcaattgctaatttttgcttcatccccattgaatatttcttaactttctttttaatataaggtctcataccaaatgcatctataattttgtctgtgtatgctttatcaaaacccttacctaatacttgtgcaaataatttcaagttatacaatcctgatttattatcatataatttaggatgctcaattaaaaaaccgatattatctgcattatcaatatctacttttccatcaaatttaataatattaccattcattactttcataacggttgttttaccaacaccgttttttcctattaatccgacaattctactatcgccaaagtcaaaatcaatatcatttaaaacgacatttgagccgtatttttttgtaatatgttctaatttcatcgactgcctcctttaaattttctagtatttattttattgagctgtttaaaataattaacaataagtataacaatgcttataattagaaaaccaatatttaaaatatatgaatataaatctgggaatgatgattgacttagaagaaaataattcaccaacactattgcaattgaaaataaaaatggaactaaaatgataatagtaaacacgtatataccatatggcactttgactctacgcaattctgtaaattgactaaatgcaattggtatagacaagaagttagatatgacaaatgcatatgcagttgaaaaatagattgaatttggttcaatcacatctgcttcataagcatataaactaataacaagcgttccaattaatgttaaaacaatgcatgtaatatagttggcattaagcaattgtttttttgacactggtaaactcatataaaaataatatgaatcattaccacctaatctacgattgagtctaaataagtgaccagcatctaaaatccaaataatcaatattgttggactaataaaagattgcaataggtaaaagaactttgttgagtcaagcattacataaataggatataaggttaataatagaacatagatgataagtgtatatcgtcgtaatttaaaattcctaattaacagtgccttcatttaaaaaccttcttccatcaatttgatgttttcatggtatttaggttttctcttttcaagataaaccattaaattctcaatagaaggtgtagtgatattcactttttgacctaaaatttctttaaatacttgcgcatgttctgttaatcctataaatcccgtacgcttatgttcttcgtaaatcagcaaagcagccaattcttcatctaaatcttcgagggctccactcacaacttgatatctttgtaacagttgttcttttgaaccatttaagataacttcaccgtcacttaagtgaatgatataatcagctattttttctaaatctgagataatgtgtgtcgacatgaatattgttttattttcatcaattaattcttgctgaattatctccaatagctcatttctagctaagggatcaagacctgaagtaggctcatcaaaaatatacaattcagcatgatgtgaaaatgcaactgctagtgataatttcattttcatcccagtcgaaaatgtttttattgatttattgattggtaaatcgaacttttcaagataaaattcaaatacttgatggtcccatttacgataaaaaggggcaatcattttttcaagttgcttcgtagtccatctctcattaaaataattttcagagtaaacaaacccaattctattctttaactctatcggattgagagccatatcctcttctaatactctaataacaccagtttgtggttgatacaaatccataattaaccttattattgtggttttaccagcgccatttctaccaataaaaccagtgacgaatccttgaggaactttgaaagagatattctttaaattaaactgatcacttgaataattaacattacttaattctatggcattcatgatgattcctcctcataaatgaacgttaaaatatcttgaagttcctcaagtgacatttcgatggcttgcgcttcattaaccaattctttaaccaaattttcaatggtaaaaaattgtttctcttttaaaatagaactatcttgctccttaacaaaggtcccttttcctctaattgttgtaacaaaaccgtctttctctaaatcttcataagcacgtttggtagtaatcaaacttacttgaagatctttggcaagttctctcattgacggcaaatgctctccaggagcaacatatccctttaaaatattttgttttacttgttgcttaatctgttcataaatcggaaaatcactattgttttttaaaattattttcatcaacgtccccctatcactttctgtatatatacaatatacacaatatacacagttttgtaaatatgcatgtctcattatcaaccagtcttcagaaataacactgagtattgtattactagcagttgaataaaatgaaatgacactaccatttaatcttgcattgtctacttcaataaaaaagactgctaaaacgaatgtctttaatctctacgtgacaaccgtagcgtcaacataaacaatcgttttaaacagtcaattctatttactatttttacgtcgatcattacttctacttataaaagcacaaatcataaacataatcgctgctaataataattttataccttggctttcatgattagttgcttgtaaataataaccaataataaataaaataattgcaagtactacaaatatttttgttagatgtttcaatttatttcacctcaacatcgacattataacaaatataaatttttttaataagttattgaatttcaaaagttcaaggtactaatcactttcaactaaaatagcgcaacaaaaccattcaatcaaaatgattattgattgcgatatattgtgttcaatgatattatttaagtgtatccgcagaattatactacacaaccccaagtctggtaccagcagacttggggttatttatgtgtgtaggatcattttttatttttccatttcagttctaaccaaagtcgaaaaataattagtaagccacctgtaataagtgtcatcatcccttcttgccaccacatcattacactacacctccgttcgactaaagtatcatactgaaggatgacctacacctattctaacataaaaacagaacatatgttcgtattttggcagcagattttacatattattcgttaattcaccaacaacactttatctttggtataattgaagataatatataggcatacaatttttttaaagagaggttaagcaataatgaatcctttagcccaaagcttaaatgaacaacttcaacagtcaaatgcaactgcctttgcaatgttatctgacttaggtcaaaatatgttttatccaaaaggcattttatctcaatctgctgaagcaaagagtacaacatataatgcaactataggtatggcgacaaacaaagacggaaaaatgtttgcatcatctttagatgcaatgtttaatgatttaactccagatgaaatattcccttatgcgccaccacaaggcatcgaagaattacgtgatttatggcaacaaaaaatgttgcgtgacaatccagagctatcaatcgacaacatgtcactaccaattgttacgaatgcattaacacatggtttatctttagttggcgatttatttgtaaatcaaggtgacactatcttgttaccagatcataattggggtaattacaaacttgttttcaatacgagaaatggtgcaaaccttcaaacatatcctatctttgataaagacgggcattatactactgattcacttgtagaagctttacaatcatacaataaagataaagtcattatgattttaaattatcctaataatccgacaggttacacacctacgcataaagaagtgactaccatcgtcgatgcaattaaagcattagctgataaaggtacaaaagttatagctgttgtggatgacgcatactatggtttattctatgaagatgtgtatactcaatcattatttactgcattatctaatttaaattcaaatgcaatattacctgttcgtttagatggtgcaacaaaagaatttttcgcatggggattccgtgttgggtttatgacatttggaacgtctgatcaaacaactaaagaagtattagaagccaaagtaaaaggtcttatacgaagtaacatttctagtggacctcttccaacacaaagcgctgttaagcatgtattaaaaaataataaacaattcgataaagaaatcgaacaaaatattcaaacattaaaagaacgctatgaagtcactaaggaagttgtctatgctgatcaatatcattcacattggcaagcctatgactttaactctggatactttatggcaataaaagttcatgatgttgaccctgaagaacttcgtaaacatttaattgaaaaatattcaattggtgttattgcacttaatgcaacagatattcgtattgcgtttagctgtgtagaaaaagaagatatcccacatgtatttgattcaattgctaaagcgattgatgacttaagataattaatttcaaccaataatctgatgagtatgactcggattattggttttttatttttaaaattattccttctttcaaagtatcataagatatattttattcagcaacttgtcaaacactatacctaattagttttatacatctctcctaacaaaatcaaaaaatcggacagatgaaaagtaaaaaactttttctatcagtccgatttattatagaaccaatttatataacttttggcaaatcacttcaaacattcaagcatcacatctctacaaatgtaaaaggcaccccacgattgtgagatgccttattataaaattaaagattagaatttaagttcaatatctacctttttaatgtcagttgctttaaatactctttcatctttatactcagtttttaagtctacatattttgacgaaccatttttaaaatacactttatacactgcgcgttcagcaagtcctatgtcatgtttagttatcccttgatcatttgccattgctgatttaagttttatacttaaatcattaattgtaattttgcttgcattatagaacacaaattcatttgaaactatgttttcaaatttatttattgttactgggaatttcacattattagatttatttattttttttttgatttagtgtattgttttacatcaatatcaatctttttaatatctttggcactaaataaattaggtgtaaagatgtctgattttaaattcactacttgtttctttccatttttgaaatatactgtatattttgcttgtttcgcaaattttaagtcaagatcactgatgcctctttcactttttaatacagatttcactttgtcatttaaatatttgtaactaattaattgtttattcgaaatttttagttttgataaaattggtgttgatgtgccatttactgcaattgtatatggtacatagctatccgctttcgcttttgaccctgttttaacatcaatatctatctttttaatatctttggcactaaataaattaggtgtaaagatgtctgattttaaattcactacttgtttctttccatttttgaaatatactgtatattttgcttgtttcgcaaattttaagtcaagatcactgatacctctttcactttttaatacagatttcactttgtcgtttaaatatttgtaactaattaattgtttattcgaaatttttagttttgataaaattggtgttgatgtgccatttactgcaattgtgtatggtacatatctgtctgctttcgctttagttcctgttttaacagtaatttcaattctcttaacatctttcgcatgaactaagtttgctgtgtaattttttgaatttaactgtaagattcttttaccaccatttttaaaataaacagtataataagctttcttagcatattttaaatcttgttcactaatacctctatcatgcttcagtactgattttatttgactagttaaatttttgtaatttgtccaaggtttatttgaaaatgaaagattcgataaaatgtttgtagatgtaccatttaaattaattgaatatggaacttgatagtttcttttagctttattttcgatatgtttttttgtatctacgttaatattgatacttttaatatcacttgaattgattaaattcgctgtgtaaatacctgatttcaaatctataactttcttcgttccatttttaaaattaactgtatatttcgcttgcttcgaaagtcttaaatcaacatcagtaatacctctatttgattctaaaactgatttaactttaccctctaaatctttgtaactaatattttgatttttattaaatgttaggtttgataaaatgttttggcttgtgccgttcactgtgattgtatatggcacttgaacatttgctttagctttatctttaggttgctttttagtatctacgttaacactgatagctttaatgtcacttgtattgattaagtcagctgtgtagatacctgatttcaaatcgataactctttttgttccatttttaaaatgaaccgtatattccgcttgctttgaaagtcttaaatcgatatcactaatacctctattaaagtataaaactgatttaactttattctctatatctttataactaatattttgattcttattaaatgttaagcttgataaaatgttttggcttgtaccgttcacagtaattgtatatggaatctggatgttagaatgtccatggtgtaatgtacttgatgatttatctaatggcttagctgcggcagatgcttcgttagtattaaagtttgctcctgttgatgctataacgcctaatgctaatgttgttgtaatcaatgacttaaatttcataaattatctctccttttttatgtaattcgtgattgcaactttattatagccagactttctctattttttgaattaactgaatattaataataaattatctttaacaataattttttaacactgttaaaagttcttttaattttgattaactaactaatttacaatacctaaaatgttgtttgattttgtttataccaagtttcaaacttaaatgtcataacaatcttcatttcttaattccgattatatttgtcaattatatttacagcatctttatactcaaaaaacatttacttaaaaatataaattcgatttaataattaatttaaatttagttaatcaattttgcatctattttgttgtaagctatataaaaggagtgataatgatggtgaaaaaaacaaaatccaattcactaaaaaaagttgcaacacttgcattagcaaatttattattagttggtgcacttactgacaatagtgccaaagccgaatctaagaaagatgatactgatttgaagttagttagtcataacgtttatatgttatcgaccgttttgtatccaaactggagacttttaacataaaattacttatcattcaaaaagtaaaacagcataatatcaaggtttataactttatcattatcaataatacctcatataaaataaaattttagggactttttagggactttaaatttaaaattacaagtttaatagaaacatcaaaataatcacatgtttgtgtggaatgtacaccccaaaagctagactgaaaaatctattttttgaggtgtatttttataggtaaatataataaattagagtagacaactcagaattccaattttataataatattgcttgacatatcaaactagatagtactattttgaatatattattataatcaaaaattcattgtaaacttttaaacaaaaggaagtaataaaaacgtgaaatttaaaacaactaaagaatgtaaaagtaataatatctttaaaagaagtcaagaaattaataatagtgaaagtgaaaagggttgtttatggggcattagcatgttgattctacttttcttattgattctgtttggaataactgcttgttcatcaagcattcactttattaattagatttttttacttggaggtatcatgtgaagaaccatacaaatataattaatatcttattagttatagtcaactcattaactcattttctaactctaaacacctcattttttaataattcagcatcggatttctgttttatcataggggctatatttttcttgatcggaatttttgttgcaatatacggtatgaagcgagcaacatattggttaaacttattgattttatttaccaatattttttattttctacacttctgtgttttacttttgttaaaatatataggatttaaattatttatttatgaagggtgtgtattgttatttacctaatttatagtctaattgtctatttcatctgcattataaattttttcataatggccgcaccattcttaatgactaatgctgattatgtatggacgcctatgactacagttacgttatttattttgagtttgattattttcttgatatttataaaaacaaaagatgtcgttcatttaacaattttcatattaaacttacttttttcaatactttattgtttacctatactgttttatttatgaacacttttatattatctagaaaattaaaaccacccttttacgggtggtttttttaatatttactttttagtgcttcgtcaatttcattataaatcttttgaagttgatattttgcttctgacattttcttaaagtcttttgacttaagagcatacattgctttttgacctgaaatttttatagttcgcttataataagtgtttaaacttccagtagctaattcattaacatttagttcatctaataacgattttaattcattagctaacttttcgttttgatattcattcgatgttggcaagcttgtgctagcttgtgcctcatttttatctagattagttactagtggtgatgctaaaacgattgctaaagttcccgcaagtatagattttctaattttcattttttattctccttagtaattagtactaatttattttaatgactaactaaaaaaaagtacattaattattcattaactatatagatcttcttattaaatgaaaattaataaattatcaaattgacataccttattgtatttatagaaaaacaaaaaaaggtaagcaccgaaatgcttacctacttcccataaacaatataacacatatacattgatttggaaagcgcaaaaataaatttaatatactagcccgaaggggagcaatacataaaaaatgaaaggcgctccttgaaaacgcccaaggtaatattaacataaaatggctactattgcattatctaattttatttaattaaaacaaatatatagcacaaaaaaactagcccgaaggctagcttatgaatagatgaaaatttgaacacattgctgtgtctaaaatgattatagcataatttcaaactattctataataaattaattaacttcatatgaaactttacacactttttttcaaagtgcgctaaaattaccaaaactgcttattctattacctgccttgtctacctctcctgtcgctatataacaacgttgtccattattagcaatataagtaatccatctatagccattaatgcaatatgcgccgtcatatttgatcgttgcgttattgggtaatacacctgtaattcttgaattagttgaatagccatccctcacgttattacctttaacattggcaactgtgtaataaccagtctcttttttatacggtacattgtttttatcgagtgtataacctgctggcactggtgaattcttttcatttttagctggtgttttaacattactgatacctgatacacacttccaataaaaataaccacaccatttaagatgcggtgtagcgactgtaatatttctatgttgttgagatatatgtatcgagtgaagggcaaaaaggatatcaattgcaggataagtgttaggttactaggccacttaacaggctatatagttcactcctactatatacacttaattataacataaaaagcaccccgtaaactattatacgggaatgctaaagtcatatatactacgggggagtagtatgaaaactatgctctctatcataagaaaaaaacacccagtgacatgcttgggtgaacaaggatagatgtaaatagttgatgcatgtgtaacacatcatagcaaaaaactagcccgaaagctagctataacatacaatctaaaaagacgtcctttgaatacgtctagaaagattataacataaaaaaataggcaagtaccgaagtacctgcctaaaaaaggattatccactttttcatcctaactgatttctccccataagtcacctaatatctgattaggtggggaagaaccattcgtgcatgaatgagaatttgatgaaagataattttcactacacatattcaatcaagacattgctttctataataaacaactattttgttttatttcttttctataacaacctttgtaattaagttgaatccagggtttttaatatgctctgataaatctgggacaacaaaacctttttctgttatagggaaagacttcgtttcttcttttttcttattcttatcataataagtgacttcgatctttgcgcttggatctaattcaactactctaaactctttatatgctgtcgcatctaatgcccattcgacatagtattcaattttttcttttgtaagtgtagtcccaggtttaataggaaactcgacataatgaggggatagcaattcatttcctttaccatcaactccagtcacatttaccatcaaatacgggcctgttggttcaaaataactcgcgtcatcgccttttttatattttcctttgtcgaatgaacttgatgcacttacctcattagtaattgaagaaaatgagaataataacaataaaacagttaaaaataataaacttcttttgagcatggcgcttcctccaaatataatatatttgtttttatttatctctttttatagctaacacccttatttaagatgataaatatcaacaacttcattttatattgagaaaatattaaaaatcaataaaatattaaaagaaactaaacttacattaaaaaataattaacaaatatttaacattttaacctaagaattaaaacacttctttcacaatcaatctctcatgccatatccactcattatgattgttccaataaatgcgacaccaaccatctataatttcaaacacatatattaatgttccaggcgcgtatacagcctgtccaacatcgaatctatagttagtacgattatcaccgtatctagtggctgaagtagcacctaagccgtcgattttcgcattaaaataagcaccttttgaccatttaaggttataaggcgctttacttccaactgttattttacttgcagatttaccgactgctttttgagcaggtggtttaactttatttgtgatcttattcattaagccctcacttttatacttaggtctaataaagtgagtacagccgtaataattatcccaacgtaactttgcaggcgtatttgcgttaccgtcatagttctgttccaaaattaaaaattgatttgtattaccaccattaaacactaaaccaatatgaccgtattgtttatatattcctttggtaaatacagccacatcacctatttgtggaacaaacgatggtgtgttttcatatactgttgccatgtttttaaaatcgttattgattgcatcttttgcatttccccacattctaatttctaacaaccaataaatgtaatcaactgctaaatctgcacattggtaaccataccaaccgtcaaaatcaatatatctaccttgataccaacgtaaccttgctcttgcttcactgtatgttttcattattttacctcctagtattttcttcttggttcttcatattctaaagcttggtggctatcacctatacctttagtagtcgggtcttgaatcacaccagttaatactaaaaatcctaatatagcgtttaaaccgtctgttaattgctctgtataaacttggatatcatacccaatagcttttgcgatgttttgagcaaataaaaagatagctgacaatatcgctacccaaaatgatttttgtttcattctaattttccaattaatcatattcttatctccttttacccaaaataaaaagacgactaataagccgtctatttgatatttatattatggtgtgttaatttatatatagaaaaagggcaacatgcgcaaacatgttaccctaatgagcccgttaaaaagacggtggctattttagattaaagattaaattaataaccatttaaccatcgaaaccagccaaagttagcgatggttattttttattgcttaattcaataagcttgattactagacctatcaatgcaataaggaataaaccaaactgcaacatggtactaattgtaatcattaggcatctcctttctaaagatttcagtaatgccaacataggcaccacctccttatactcagatagccaccatctatccaacttgctcacttctgcatattaccataattacaacaataaataaaaagccagtgccgatgcactgaccaaaaacattatttacatttacgaccatacaaataacatgataaccatcttgcccaactcattatgtccacctcccttaaggtaataacgcagtaattgatgcagtaatgactgcaatcataacaattgttacaagcgcccatatggcacctacgagccatttattttgggcgagtgtcttttcttcatttttttgcgcaacatctacttgcgtttgatatctttcttcaattctgtttaatatctttgtttgctctaaattctcatctacaactttatcttgcttatctttaagttctttatgagattctcttagttcattatgatgttgcttatgttcctctctaagttcaagcacatgatcagctgtttcgtttgctagtatttcaacatcatcaacacgttcaactaattcagaaagctctttttttattttctgaatatcatccaaaactacacctactttctaagaaagctatgagcgtaatgctcataacttagtatagttacattatttcgctatcaactgatttatcagatgacaagtcagttctatccacaacttctttcacaactttcacaccgttttgattgcctgttaattgatataaaagatttaaagtttcagcaatctttttagcgttttcctcagatttaaaatcttgtgcataacttgctgaatcggacgttgtaaaactgcctacaaaatcttgatacaaaacgcgctctgttccctctttgtcaatttgtactaaaataaatctctctgtttttttgataatttcatttgccatattaaatgacctccttaaatttttgtataaaaatagtgccaaggattactcttcctcagcacttttgcttttttcattttgttcttgtatatatgcttttaacattgcattttcttgtgttagtcttgtgatttcttgcgataaatagtgaattgtatattgtggattggcttgtaaaccttgattgctatcattcatttattaattcctccagtttttcgatttttgattgctggtttttaataataggtattaaatgaacccaaagtctatcgtatgcgataccttcgatttctccgttgtcatcataaataacaaattcattaaatcctaattcttcaacctcttccgctattaagccagtatgtcgactaagtttaaaagtatcatcagataactttttaccactttccaattctttagccattatttccgattcatatttgtcaaaccatgtacgaattggaagctttaaaatctcttttgaatgactgaactgatcgtcttcattgatgtattgattttcgattgaaattttatactttttggcagaagtagcacgcccaattgttccagcagaagtaatgtgtaagttagcaggtgctgaataagtacgcttataaatagaattagaagcgactctatcgccagcattatcagaacctaccgccaataaatcataactttgaatgctaacgtaactatttccatctcttcgtttaactatgttgaatttgcccatacctgactcaattgtagtgtctccgcctgtagcatagtcaccattaacgacttgaaccaatcctttattgctacgtttagaaaatcttaatccagcaccgtacttatagttttcatctgaaccaaacatgatataaccgtcagtttcgtatgcactatcagcgtttgataatgtgaatgcgaatcggtttaaaccaggtttatttttggtgttcggagataaatatatcggtgcttctctactttcaatattagctgaagcatatgaatcgataataattcggttgtagtcagatgttaaagcgactacaccgccataagaattgattgttatgccattcataccgctatcactgtaagttttatcccaccattgaatagtaccggatgaacctccgtcttcgccttctccatcaatatatgttgaaataccaaaatgtgacatataaagtgaaccgcctgcggtattatttctaaaccttagatgtccatctttaagacgtgtgaatatatcatcggttgatcgtttgcctttccaagttcgttgtacgattccgccaagttcaataaaatcattttgaacttgtacataacggttagcatttccgcctttaataccaattctattcacattgatgtcaagaccttcatttgataagtttaggctattaacaatgtcatttttaccaactttgttattaatattatttgcgactacattaaattctctattcgctgttatatcaactttatcgccactaattttcacgccatctttatcaatagtatgtgaagtaatcgccccattttcgtcataccttaaatagatgcctttcatagcatttacagtgatgtctgctaacactcttgatagtgttcttttagaagcattaaactcttcttttgtagttcttaatttgatttccttaccattttgtataatttgagaaccatagcgagtcaatgttttcctctgtgcatctgtgctttctttgaccttgttgtctgtataagcattagctttcttttcagcgtttctagcctttagttctgcgttttgttttgcctcttcaagtttagcttgagcatcttgtatagcgcgttgctcttcttccgaaattttaccatcagcatacgcttgcgattccttctctttaagatcatcttgagcatcaatgtatgattttaaagcttcttgcgcttcttgatttgcttgttcaatacttgctttaatctcaggattattggacaaatcacttaactggtcatcagtatattgtttttgttcttccaatccgtttcgatattcgtttaacgtaactttatctttgatttcaccttttaaagtcgttctctcagcttcagcagtatctaaacgttcaacaataccgtctttgtctgttttatagtccgatgtttttacatagtcacgtaattgttcttttgtggattctctagctgcttcaatagctgatttaacaacattaggttctccgactaactgcaaatcttcattcaccgttaaaccaaattttgttgctattatttccaacgcttctttatatttttcatcagtgtattgtgactgtaataatttaaatctatctgaaatggcgattttgacatcttctacatctgtataaacatcttgtaatttctttctatactcaagaaataaagtttttgtatctaccaaccgaccaatcgttgcagtttcgggtgtcatagattctaaattatttttaatttgattataaacatcaatcacagcgtctaaacttgcttgtaagtccgctttcaaatcattatctactaagtactcgctattcagtaattctgtagcttctgacaaaagactagcgtgttgtatagataaattaataaatatattgtttaattcactgaatagcgctttctctcttgttataccacctaatttttcaacatcatttggtgtttcttcaatccatcgaccattccaatatctacgcaagacagcaacatcagggttacttgtatcataccaaagcatatcattgactggattttctggcggtgtatcacttttgtgtattttgcgttcaaagtattctaattcactatctacaacatcttttactatagtgttgatattgctaatattatcgtttaacttttgatgtattatgttcaatcgcttgttaaactcttctcgtaattctgattctttgaactctttaggttgaccgaatgtatatgtgctattttctgaaattatgttatattcttcggcaataacttctgcctctacatacaatggcgggttaaaatctctatgttttactctgactgtatcaccaattgatataatctcgtgcggatacgtaacttccaaatcagtagaagtaatctcatatgacataactgccgacttacgtttatttaactctgttttggctaaagaacgcaaccgtgtttcattcatattttgatcatctgattgaggttcgtatattccccaaatataacgggtaggtaagttgaattgactttgtgcttcgtcatctgtcacaactaactctaaacgctttcctttgtcgttttcgggtcccacagcaattaatgctgttttgatttctgacatatcaatcttcctagttaacccaaccaaatctttaccatactcaatttctttacctttgaataagctgtttttctttttgagtaccacatatctacctttgacggtattagaactaagctctatataaaaatccaataccattttataggttgtacataattgctttaaaacttcatatctagtttgataagaagtccatgacgtagtacgtaagccatcgtattcggtttgttcagaaacttcccaacctgtatcactcaacacatctttcaatgcttctgaagttatctttttctcaaatttgcctggtgcatacggtttagctgttgttatatcagcaagataagacgctatacattctatctctgtgtagccgtccatcgtatcttgaacccagttaataataaattcacgccattgtttgtttgaatcccttataataacacgatgtcgttcacggaacttttcagctctttctgatgatatgagcagttcaagtatttctgaattgtcattaacattacgtttatgaatcgctctaactaaggaagggtcatcagtagaaaggaaatctataatcttgtcgttaaaatctaaaacatgtatcacactctcatctcctttctataaatatctatcttgccatttaaccgtcgtatcaaagacgttttcaggttgtatgattaattcactgtacccagaatcaacattgaaataattacttccaaacgatttctcgctcaacattggttcctcattgatgacaacactttttgcttgcatatctattttcactaaatcacctttttgtataatgacatcccttgcgcctttcggtttcggtagaatctccgtattgaatgaacctaatccattcatctccatccacttataaccgttatacttcgcactatagatagctatgatagaagctggacgctgataaaacttaccgccatctatccactctttctcatccatatcaataggtttacgtctatctgggtctttaatgtgatcaaatttccaagttttaatagaaaatttattacctactcttctgagccgcatataaacaacgattctgtccaagttatacattatcggtttattctgatagtcgtatatctttttggggtctcctttttggttatacaacgtaacaacaatatgtcctatttttctatcatgatatttattttcataaccaatagaagcaagtaacttaccatcactatcataaatatgttgtgctgttcttccggcacctttacctttttgttcaacaatacatttataggtaatttgaaaatctgtcatcgctttagggagccctcgtttcgtgccagcaccaacccaaccttttgcatcaggaaaattagttgctttatatccttcgccaagattggatatcacaaagtcaccgccgaccttaccacctaaatcattacttggaatatcttcagtaatcatcttagtccaacctttgaaatcacgaaactcactatgataaacaggaggcatgtaatccttaacttctttggttacctcatcatcaccaaccataaaataatcttcatcatttttagtgatcataaagtaactagatggtttaattgctcgggcttcaacaattaaaggagtgtcagcagtcccactatttacaactgaaacttggtctgaaatcgcagtatttttatttcctgttactgaatatttgtaagggtctgttagtactactttgatagtgaacttcactgaacctcttgggtttttcggtaattttaatggtccatcaaagtatgcaaaccaataccagttttgagatttgaatttaagttttttcggctttaaattgtcaatatcaaaaaattcaactaactcttccaatatatcgtcatgcgttttttgtccacctggcgccaagacttcatttctaattattagaggtaattcaaattcgatatcatttagataacgagctttagcaatagaacctgttctacctttcacactttctttttcagtaacaaaattaaaagagggtatctcaaaccctctttgtacaactaaccattcaatggttttattgtctatttgaattgtatcttgcattagattatcgtgcctcctcttctaaatctaactcttgtagattcgtgacgctctcgtttatcgatagaattatttacctcatcttcaaacacatacttattaataactggttcgtaatccttatctgcaataacttgattagactcaaccaaactaaccaaacaattaataaccgcatccagtttattctccaatgtatgaatatagtttgtatcactattacttatacttggatttggtaagttgtttggtcgcttatttttagagcggttatcaatatcgttagcagctaaagctaataatttgtgtgcttcgttcgctctacttggatcagtaggtattatccactctggatatccttcttcccctaagtggtacaatccgttatagactttgccaccagtagcatatgcgtaatcaccagcgcgtttgaacgcagctctccatgagcctgttcttggtacccatttacccacaatatatctcatagccgatatagcttgatgagttgggttgagaggattattgtaacccgactttgcgtacgctctaaatgaaggatctatcatttggaacatacctcttgaaggtataccagctcttgcgttgctatcccaattattgactgcattagctgtataattggattcacgactcgcaacacgcatcatttcgtgtgtaatccagctagctttgtattgacctccaagtatattttgagctgttctaatcgctctgcgcgcattttcagaaccactccctccaggtgaattctttccaccagttttgtcgtttttccgtaaccaaggaatagggtctgtcgaatacctattggactctccgccttgattgacttggaaatgtaaatggcggtaattagtcatagaacctgtattacctgatttaccaattaattgaccagctttaatttgttcacctgttctacgcaattgttcagataagtgcatgaaccacaaaaatgttcgacctttttgaacagtaattgctttaccgccaccatagttgtcataccaacttctaacacgtccacccattggcgtacgtataggggtaccggtcggcgtatcatagtcaacaccatgatgaacgcctccgttaaatggataattggggttaggaggttttggcggtgctgaataaggttgtagtattctgaaactatcaaacacagaaccatctcccgcttggctctctaatccttcttttatccaattaatcgccttacttttaatcttattccaagacgcttttgttatatcgccaacaatacccatacctttagttagagagctaaagtcaacaccaaacgctttgagcacataatttaaaagcttacccggattatcaataaagtccattacatcgccaactttatcgccaagccatttggtacctttacctatttgatcttttgtccagttaaatgccgatgatgcactagatttaatatctttccacatagtagtaccgaaatgaaatctcggaagcgttccgtttaacattgaataagtttgtgccccgttgtatacttttgagcctttaggtaaataagccgtagtatctgtatttggtgtgattacacgtttaccattagggaattcaatcatttcatttctgaaaccatttggaccatttccgcgtcccttatccccaactgtagcgaatgtgtcacgtgcaatcttaccgttcttaactaatcttgtagtagtatgtgtatgttcagtaccagtgtgtaacttcggtattttgtccatacccaacttaccaccgacccagtttaaaccttcaattaatttattaagacctcttttaacagcgtctaccataccaccgatatgatctttaattttaccaatgatagattttaaaccgtcacgcatgcttccaaagatgttacgtactctatcccataagcgaccagctatacctaccgtgttatctttaatagaattccaaatatttgacatccaatttcttaatttagtaaatatatctttcgtcgcattccataaatttgtgaatttagaccttacacccgtaaataacgaatgagccttgtcgacggtattgcttttgatattattccacgtactagataaccagtttttcatattagtgaaaatagatttaacactattgaataagaaaccaaaaatgcttttcgtcgcattccaaattgccgataaagatttactgaatatactttttattacgtcccaaattcctgctatcaatccttttagcaatccgccaaagtacctaacaacaccaagtattttgcctacaaaccacagttgtattaaattccaaattaactgcacagtgcctttcagtatcattacaatgccgtcccaaacacctcgccagtttcctgtgaaaagactagagaacactttgataatacccaaaataatattaatagccccttgtattacacctttgatattttcccaagtgctgacaatcaaagctttaaccgccggccaaataaattgcatcacttgccaaatcgcaaacataattggtttaataataaagttaaaaataaattcaaaggttgctttaatgaaaccagctatattttgcaaagcttgtgttatttctgagccgttctctttccagaaagaggctaattgagcgcctatctctttggcgaaaccaacgattgcatcaactactttaaagaaagttgttctaatcgtattaactacattttgtattcctgctacagtttcgggtggaaatatcttctctagggtaaccgcgcctttactatcacctttgaataaatcaaagaaaccttgtaacgctagtttagctgctttaaatgcgtttgctacaccagagattgcctgatttacaatatttctaaaagtttctgaacgtttataagcttgatagaaagctatgccaataccaactaatgcacctacaattaatgttatgggtaacgttaaactggatatcgacacacctaaaatcggaaatagtttaacaagtgatgcgattttagttcttaaaaacgcgaatatactaccagctttattaacgtttattaacaagggtcctaaaactgtcattgcattccccatcacgctgataaacaaaccgaacataaaaactaaaggacctaaaactgctgcaaataatccaaacccaacaaccgctaattgaattgacgttggtaatttagtaacccatgtcactactttgctaaaagcacttactataatctttagtgctggttctattctgtcataaatcgttaaggctagttcttctaattgcgaccttaaagttcttaatttcccacctaaaccagattccattgtatcggccattcttttagatgccccggtagatgaatctatagatttggttaacttttgatagtcttcatcagaagcatttataattgctaatgctcctgacatcgcttctttaccaaatattgtagctgcagaactagcttgttggtcttttgaaagatgtttaaatttttctctcagttggtctaaaagctttcgcataggaatcattttcccattactatctgtaatagatattcctaagcgctccatttcattccccatagctctagtcggacttgaaagattggtgaacattgttcgtaacgctgtacctgctttttcacctttgataccagcattactcattaaacctatcgcaatagatgtatcttcaatcgtgtaacctaacgcacctgctacaggagcgacatatttaaaagcttctccgagccctctaacatccgtatttgccttcgagctagtttgtgctaaaacgtccgcaaaatgaccactatcctttgcttttaaaccaaatgccgttagtccatctgtaacaatgtcacttactgctcccagttcttcgccagatgctgccgctaaatccataactccgcttaaaccttccatcatttgcttagaatcccaaccagcaagtgccatgtaatttaatgcttcagccgaatctgatgcgctaaattttgttgttgcacccatttcgcgagcctttttcttcaaagcttcaaactcttcaccagtagcacctgaagttgctttaacttttctcatactgtcatcgaattcaataccttttttagctgctacagcaaacccagcaaccaccggcgcagttacatacatagtcatgttacggcctacatttttcatactgttaccaatttcttgaagtttaggaccaaaattattaaagttggtaccaagttttcccattgcagtatttaatgctttctgctctctttgcatgtcttttaattcttgtgtggcttggtttaactctcgctcatattggtttaatttagcgtaagcttcattgtatttagcagccgcagcttgtgtctttgcactgttttcaccagtttctttactaagtttgtcataactatctttcagctctttagtaatctgggcttgaactttttgttttttactcaaaccttcgacttttatcttcgacttttctaatgaattatcatatctagaaaattgtgataaattagccgaaagctcacgcgaaaccattttcatttgcctatttaaacctgtcacacctctattgaatccagaaccatctaaatcaacctttatgaccatattacctataggattaggcatttaaaaacctcctttcttccaagatgtaaataaaaaatcaacctttaaaggctgattaaaaaatatctttaaaacttttcgcagttcgctttgtttcaatcttcgattcgacaatgtctaaaaagaagtgtatcggcatgttagccactttttctgcatccatgccgttttctatcaaatctttagctattttcctgtaattgttgtagacagcttcaggtgttaaatcttcttttcttatttctgattctctgtcacgaacttttttgtatcgctaggttccccacctgtaatgcgtccaattaactgtccaatcttttcaataccttcttgaccatttggtaatcctttttgaagttctatactagtaaattgattatcaaaagcttcaacgatgaaatccaaaacttcttccaatacttccatttgtacagccatgttgttttcgtattcttcttgcttgtttttgtattcttcctgttctgtcacacttaagttattaaattcttcttctgttagatctttaaaatcagcccccttaaaggctttgttaagtttcaaacctaattttgaaccttgaattgtttcaaacaaagtaataatcggctttgctaaatacttttgatattgcggctttcctgtttttgtaaatcctgtaattaattcaattgatgtacgttccattattaaattcctactttctttttaatttggccaaaataaaaagagggcgttaagccctcaaaacttacatttctaaattagattgtactgtaatttgcacagtatcagtttgctttcctgcagtcgctgtaacggtcgcattaccttccgccaaacctttaacgagaccagttgatgttacgctagcatacgtttgcccctcagtcactgcataagttactttctgtccagatggttcggttgtggctgatagttgtttagtagcatcaactttaactgtaacttgttcatcagtgacgtttacagaagtgacttcaactttttctgtttttttcatttctttttctacaggttccatattttgttctcctcgactagacatgaattcatcataagttttaccaaatgtttccatgaatacataatcgcgccctgtagtgcttccttttttatcatagcctgtaacatgcgagctttcatcaaacaaacgatcaataaagttaccttctacatcatcattttggaattcaaccttatcttgtttcgtttgccctttgatgcttgaacgagtgaatttacctttgaacaagccaacccattctgaagactcatcatgattacgtctttcaaatacaatcgctacatctggcggaatatccttagctccatatttataaccacctacaccttttttagcgccattcaagaacgccttatcgtcagcaggaacagtaacaaatgttgtcttaacactcagtttaccattagatacagcagttgctgcgaccatatcatctccataatcttcctcggtatcttgtggacggtctacttcaatttcttttaagaaacgaatacgtgtgccagctccagtttcccattcattttctgtatcttttaaaataggtgcataataaaagtttgataccccaattgcgatacccgaaactcctgtatctgcaaaatgttgtaagtttaattttaaaaatcttggtgcttgtttcaatttttcaatcatttaattttcctccaatttcattgataaaatcgagccttttgctcttataatatgtctgaatgacatgacgtcactctcgtataacggttctctgtaataacattgaaaatttatcactttgagtaactcaacaattttttctgcttgctcgttcggttcatcttgagaccaccaaacatcaatttggtaatggtattctcttgaaatctcgttatcatcagcgtatgtgtcaggattgaacggtaagggatatatacgaataataggcttgtcagttttttcgtgaaaatggtcatctatagtgtagttaaacacattcacttcatctgtaatgttatttgcaataatagcgtttctaattattttggtaacattaatcatttttgcaacctcttagcagtatcaagcattgtttttaaaactttgtttttcccttgcttttctgtttttgttataaacaattgtggtttttggtacattgttccaaattctgttgcatgaatacggtgtgagacgcctttagcgtaaccaattgtaacgattttctcacttgtgtgtctgtctgttttcacattagaaacagctatgtgatcgcgagcatgctttttagtattcgcaaaaggtgtattactttttaaaagcgggactaatgacatagccccagctttgacaattacattactatttaaattcatttttaaaactgcatttttcaaaccttgttcaatgttattactttcaattcttgcccccattaaatgaccacctcgccatagatacgcaaataagatttatcttgataatctggctttacatatttgatgttaaacctttgcccttcatgcaagacgtaatgcttatttgttggtttataatcacctcgtgtatctctgataataatagttttaatgaatttgctacctgtattgagattcgtttgagtgtcggattctttagattcttgaatgcaagcgaaacaagagtataatattttcgtcttcggtttcatcggatttccgttcactctctcgcttacatcttcacaaaaatctatgcgttcatttaatttattggaattaaatttcatcattttcactctccaaaaattgctcaaatgaacctctcaacttatgcacagtactcaaaaccatatgaggcgcaagcgataaatccctatccaaataagcaatacggttttcaaaatagtaacttgctaaagggtatatagcacgagcaaatagaggatgacttttaaaccaatcaatatatttacttggttcatccgtaacagcgctagctatttcatggaatgcccaagagtaatatattcctaataagtcgtcctctgaattgtgatctattttgcaatgcttttttaataacttaagttcctcagctgttaattgcattcaatcacctattcttctttcactctttcaagtattactccatgctctttcagctttttgttaacatattcagcacgttttactgtcatttcaacacgtttacctgactttaaatactggcctttttccaagtcagtataagatttcttcacttcatacattgccatagtttatcacctctttataaagtatcgagcgcttattatgcttctaagccaagatcgccttcaccgcgttcactatcatcatattcaatcacaattgctgatttataatctagaattctacagtcttgacgtacagcaatcattaaacattctccgaaatgcatgtagtcagtccatgatgcttggtattgagagcggtcaaataaaacaatcgcatcttttaagttaccgataatcaaagtgttattacctttttgccctagtacttcatcaggtaaaatttcgattttagctcctaataaacgctgttgcgttttttctttaacatctggctggattaaatagtttcctagcttatctttcattttgtctaattttgcaaacatagtttgcgaaacaatcgcaacattatgttcgtaattcggcttaacattcaggttaatagcatctttaatatcatctaaagattttgcttttttaacttctaatttcttgccttctttttcaaaacctgaacttgtagaacccgttgatcctttagtgataacatcaataattgctttgtttcgtgttgctgcaatagttcgcgccatccatagtttcaattcttgcaaaacattcacttttgcatcttcgattgcttcacgtgaaattcggaagtaaccacggtgtgtattaatgtcatatgctaattggaagaatggtttaactgctaattcagggttttcttctaattcttcaactttttcaagggctgcaacttctgattgtcgtactaccggatatttaccagaaccatttgtaacacgtttgaccgtcacatacttatcaagattaaactcaacctcttttaattttaaaatatctgtaacaatttcctctggaataactacaaatcctgagtctgtttttaacgaaccaccttgaatatcattgcgtgtttcaaggtattcagtaaaatctctaacttcttgtgatgttacctttgtgttttgaatcgaaatacctaaatcattaatgtttgcttggtttcgataagtacgtgcttcgtttaattcaactgtttgtggattgttttctgaagttccatctttttcttttagcttatctaattcttcttgtttttcttggatttgagaacgtaaatcagtaatttcttgttctaatttttctgctttttctaactcatcgttattaagtgctcgcgttgcatacttcacctttaaatcaatttgtcttttaatgtctgaaatctcagattgtaacttttcttttgttttcatttaatttcctcctaaaattggcataaaaaaatagacatcgctatattcagcatgtccaatggctgtatttgataatggtgttcaacttcaccaaatattatttaatatagagtgtttctttagtcttatttctaattcttttttacgttgttcttttttaacggtttcaatactacgtaatgctggtttaacatcagtgtctttataagccggataagtcactacagaaacatctgtaagttcacgaattgctgttaaagtacgtttgtaaatgttttcttgttcatcaaaacgcacttcatcgcctttatcgtcaagcataaaaccaaacgaacattgattgatgttgcctacacgcatgttctcatataaatcacgtgcaaatgttgtgtttggtaacttacaacgatatttaagtccaacatcatcagtttcgagctccaaagtacccgattttgtcctaccaattatttgcgatgggatatgatctactaaacaacgcacatcagataaatcagtgttttctaaagcgcgacgtgaaatcgtttctttgaatccaccaagattttcagaccaagtatcaaactttaacgcatacccctctatgaccatttcgttgtcatcatttgagcgtacctcaataatgttgccaactctcgtttccttactcattttcctcaccacctttcaattttttatcagtagctctcgatttattcatctgatactcatctacaagttcaatattcacatggtttaaatcgactctgtgaatactaccattaccgcctggtattggcgctaatccatcacgttgtctaatttcatcaatattcatctttccagaatcaatgttaattttgtcaatttcagcttgtgttttctcatcaacaactcgtatttcagtggtatcaaatttaaattcacgattcacatgttcatcattaaacttaaaattcaattctgcacaaacgcatgtaatataaggttttaaagttgataagtaatctaaattagcatccgtgatactcatgttcgctgtttctatgccgaacttatgcaatggaataccaaatacacctgctatttctcttgttgatgatttgttttctctgataagctttaaaacttctgtatcaacttctaattgatcaaacgtcattgattcatcgagtacgacaactttccccgcttgtttagttccactaaaacttttgtgaaattcttctctggcacggtctcttgcttttttattatctaatacacctttcattttcaaaataccaccagcatgtgtgccatttcgcaagaaattgttaaggaaatcttttccattgttatctgattctatcgtgcgacttaatgtgtctaacagtgacaaaccatttataccatccaacgaataaaatttgatgtctaacatatcctcaaacttaacatgacgctctatattatttccgttactgtctatcctttgatgaaaataatacagtcgacctcttgcgtctgatttcaattctatttcggatgtctttctgaacgttaaattcataggttctcctgttttatcacgtgtaatttcaatatagccgtgcgatgttagtaaggcactaacaaacactattaatttgaatatatagccgttatacattgggttaggacgtgtatttaacaaattaacaatcctgtcactataattaatttgaccgttcactgtcaccctaattggcatgcgcgccaaatcagaagcaatcatcataactgcagtaaagatgtcgctatgcctaattgcttctatatctttatattgtcgtaattttgttccttgaaaacctggcaaagtttgaaccatcatttgcaaatcatcttcgttgtattgcaagtctcgtttttcatttttataaaaaattcccacaattactaactcctttcttgattgctttcatgatttaaaatcaacgaaataacaatcagtgttataccagtgcataaaagccctatattttgaccgaatgctttatacacagaaacgttaaccacaaacaaacctaataaaaaaaggatgctaaccaaattagcaaccaagaaattaaaaaagacatttattttattcaagtccattttgtcaccacctttaaaatccgaattcttcgctttcatatttctccgtccaattttcttggaattcgtgcattctagcctcagtgaaagctgtgataatcgaaataatcggatctattttttgacgattcatttttttatttattttcacattgtcttctccgtcacgaatcaaaacggcattattaactgacgttgtaagtaacatattatcgttatgctgtattctttcatctgcaacccacattctaaattctttaatagattgtgataacgccttaaaactttgtcccacttcaataagtggccaatctaaagccattgattcgattgttgttataaaactttgcgcattccaagggtcatagcaaacagcctgtacattcaggtcatgcgtcgttataaatttcactataaaatcgataacttgtttataatcaatcatgccgctatctgattgtgtagtctcagcttcgccacgttcaatcgctaattcataatttattttgtctctcttagatttttgttctaagtttgttcttaatccaatgaaagaatgactatgtaaaaacacttttttatcgtcgttagggaaaataaaccctacagatgttaagtcatccaatctcgataagtcgacacctatatacacatctttaccattgatattaggcataggcgttattacttgttcccaatctgaaatatctagcaagctatcttctctttgcgcttgccataaattgaagtttttaatcaaaatcttatgatatgatgtccctttttctaattcgtcttgtatatcagcttttacattttgaagtatagtttttctatgttcttttgattctaaaagcggcattgctttaatccactttgtttcatcttgaacttcttcttgtgaatccatttcagcacaatatacaaagtaattatcagctcttacttcttcatttaaaatacgtttaatatacttatactcttggtacatttgactatttaaattgtctccggccgttgaaacaagtagggttaaaggatttttttgtaatgtcatacctgttttaaaccttgagtacatctcatcatcaggcatacttgccaattcgtccaaaatagcaactgtaggatctttaccatcaaccgcatctgggttattggaaagaggtgcaaacactgaactacttaatacatcttcaatgtctgtctttcttacgtctgttttttcacggataaacttgcttttacttcgcattaggtttacttgttggcttgccatcttgaatattgtttgcgcttgcttataagtagatgaagctacataaatttgtctattaaatttagggtattgtccaaacaacagttcattaacggacattcccgatacgattagagacttaccttgttttctagccatacttatataagctttagtaaacattctgtattgacctctacgccagccgtataagctcccaacaatgaatttttgaaactccataagaggcatgggctggtttgttttagggtctggaagcatttccacaaatttaattgctttgttagacaaatgattatcccaatggcaaccattcggcgggttctccataaaagataggtgacgtttacatacttgaatattcttcaaacttgccaaaatttctcctgaaactaccttttttgcgtattgagtaacataatcagtcattacttaccactcacaaattccatatatggatcatcatcttctttttcatcaggaaccataatacgcaatcggctatcaatagttaatcctaaagtattagctgtttgttgcaatcgaatacccgctttttcctttatgttgaacgccggattaaccttttgatttcctttgtcgtcttctaaaatcaagtcttcgcgctctaaaatcaaacttgctttaacaaagtcactataaaaactacaatattgtgctaattgtgctttatctaagttggaaattggcaattcttgcatgtgcggtaatattcttaagtattcttgtttcgctatttcatctaaaaagtgcggtggttcagtatcgattttagaaaatttatttaattgagcttcttgacgctctttttcaataatttcttcttttgtataattcttgttcgaatttgacaaaagcttcttaggtctacccgccataaattagcacctcctactaaaaaacttaaataaagggaattttttgagaagaaaactctgctccgttctccagaacctttcattgacgcccgtttcatctttggggggacttcctatttttatcttttttaatatttcttcaaatcttcttttgtcttttggttatggcaagcatcacacaaaggctgtaaattacttttgtctaatcttcttgcccaatcaactttcgttggtacaatatggtcaaccatagtcgcttgattgccacaagaaacacaaataaaatcatgttctaacaatacgattcgacgcatgttttgccacgttttcgatttataaaaccttaaatactctggatcgtttcgacgtctcaaatcattgtaattttcaattgcatattgtttgtgtttatcacaataactttcgttatgattaatcaatacattacacgttggatgaccacatcgcttcataatagacaatgaacatcactccttgtcgactttcttaacatcttgcacagttacttgtctatcatctttatcattgctaattaacaataagtttcctatcgatccatcaacaagatacttactaccttgaaacaatactttgtctccttgttttataccattgtctaaattgatagtctgattaggtttattcatcaagatagtgttaacactatgaccagctatctcatccaagttaatacctaacacgttagtaagattaactatattccacaatgcttcgctaagttcatttatcataattcctttatctatcggtacattacaaaacatatgctgtttaattagatctgtaacattgcctgtagattgagttaaacctaagccgtaacaagtaatagattcatttaaattcaattcatcattgtgtgtacgtgtagctatctcttggtactttgatatctccattctccacctcttgtttataaaaataaaaccctcacttaatgtgagagttcaaaagaaatataaatgttttgctacacagcaattataataaaaaacaatatgtagcatcaaaattagtccgatgtgtacgatttgtacgatgtgtccgaactgtccgatgtgtccgaagtgtcggtttcttgttgcaagttataaagtatatttactatatcttttactctagaataaaaattgtctctgcctatatcaagaatgctcataatcctattatggctttctcgttgttttaacatttgtaaaatatgataatctttttcattcgtgatgtattcttcatattcatcaatgaacgctatcttcttaatcaagtaatcgtactttctaagcgctttgtttttgtttataactttcactaacactttattgctagtcgtgcctttagcttttggcatcgcagattgataaccatattgtgcaattgatgtactttcgttatcgtagactttactgtctattatgttcttcatccacttgtagttatctatcatttcacgtatttctttcctgttatacatgcaatacctccgataatataaattactttttaatatcgttattcattcgcttcaattcaatcctgtattcttctaacccgttgtatcctttagtcttaactacctcatcaagtagataatcattcatatatctgagtgcttgtatctctcttgcacgatcactattaatactgatagaaactaatagcaatatagcaaatacaatagtcatagtaatccacatcactcacttacctccgctcgaaagacgtaatcactcggcgcctctatatcatcattagccgtcatcataatatatacttgctcagttacatacttacctaactcatacatcgctagtaagaataatagtctcaaaatttctttaaccaccactaaacaccccatgttaatttatcgataatttgtatagcttgttttaatgcgtctcttttttcttcgatatctctattatcgccatcttcatcagctgacattaactcactgtcatattcatataatagttctgatatttcattactagctactactaataagttttcatctacatcaatcgttaccgttttctttggcatctccatctctccttatcttaacttgtgcctcgtatttgcgctcagcttcttctttactctctgcctcaacaactgtaaacgtctgattatctctagcagtagtaaaatgttcatgtggttgtcctgttgaatctttgaatgttgtgactaagtattgtgtcattcctcatagctcccttgaacttgtttgagcttactcataaaaaacattactaaaaatgctattaagatatgcgtcttttgatgtttataagcaaatgtagatatcataaagatagtagcaagcattaacatttcatatatgtttgtgtgtatagtctttttactcttaagaaaaataattgctatgcgataaaagagataaacgccaaaccctattaaaaatatttctaacatgtcgctcacttccccaaaacctccttgactcgatctaagatgtctttacacgtatccttttcctgcgtctgctgttccatcttgtctttcgtggttccttttcattttctttttgtatgcgtcaatgagttggtcgatagaatataagttgtaagctatgtctatcactataacaattgcttgttggtcgggataaaattctttgaatattatctgtggtgtactaacaactgcgtcttgagcaaattctttatctttaaaattaaacattttgtgaaattctgtatctttaaaacttgattcaatcgcttcttttatctcttctgatgacactcctacttgattcgcaatactcaatccaaacgccaacatgtcagctaattcatcaagttgtacgtctaacggcttacctggtttcttcttccagttcttaaacgtttccaatgtattaaaccattcaaagaattcaactacatatgctattttgctatctcgtaagttcagcgttggtattctatcgtcgaactccttttgtatttgtaataactcttgtaattgatcaattgttaatgtgttattcattttcctgtgcctcctctacattaatttcatattcatcataattaaatgatgcttcaaatatcgcaataaaatccgcctcaatttctgcttcttctaaactttcagcctcgatagtctcttcaatcatgccagcgtatgtgatttggacattaaatttcttcattttcctgctcctcctcatatttatagaccacttgacccgtcataatccctactgcctcatcaagaccaatatcttctttgagtgcatcttgcatagcattaggtaaacccttaagtatttcatcaaacgcttgcgctttcttatatacgtcctcaatctcttttagtaatccctatgtgtcattaccgttatacgcactagcacttataacggactgttcaatttgttcgcggttattcatcatttccatctcctctaaaataaagttagttgcttctgtttctcgtattccaaaccatgttgctttatatatatttctagctcttcggctgtatcaaacgtcttctttacgccttgccaacctggtacgatatgcccgtgaaagtaataattgccgtttgctacatggatatgtgccactcgttcgttatcttgatacagatatctcttagatccaaagaattgatttaggtattctttgcgtgcgttatctgtcatgatctacttcttaactttcacgaatatgtcgttttccatcaggtagcacgcataacgtcctcttggatgtttctgaggcacattaaacaaatgtggcttctttcttcttagctcagcctctttctttcgctttctttccaatttgcgttcgagtctagcttgttccagtctttctattgttttcttttctctgtactcgcttaaacgcgtaccttctggtgcgtccattgcttcatgtagttcccaaccgtcttttactctcttagaaaccattccagcggttataccgtgactttctattaattccatttcaaatttactgaacctataaggtttatcgtttattgttacaattcttgcttttctcgccattttatccacctcttatatttcttctattcgtatgattattttgggctcaattccataacgctttgagctagttatttctgtaatttggttatcgtctttccatacatggccattacaagcatctaataccgttttaattaagttgtcgatatccggcttagtcactttatactgcccaaccatttcgcttttctttttcttcgaccacgatttaagcaatggaaagtaaaagtctaattcgatttttagtgcgcgctctagatttaacttaggcatttgcccttgtatatacgctttatgctttgtgtaagacgttggcatgtaagtttgaacaaatctacctgttttacgaaagcgtggacggggcgaccccatcggcgcattaaacacttcattaaatttaatttctatctccatgtaatccctcatatatattcaaataagcttgtttggtgtcctaactccatttgttcattatcaataagtgtatttaattcataatcgtctaaataccaacgacgaccattaaattttgtttcttttattccaacaactaaatgccgaccatctttaaaatgtggtgtaactgaaaacattttgttgccgtcatgatcaaatagatagtatttatcaaatgcatccattttcaatcactcccatttgctatttagacgcttaataaaagcttctctgtctttctcaaggttttcatctacttccggcgttttcgtttctctcgtgctgtctgtgagccatttgggtgttttttctttcgatggtttaacataaggtttattagtttgctttttgctttccagttgttgcttttcaaatgcacgtacttgttcaatagatttcaagtttgcattaagccatgtattcaaaatgcttttagcatatccccaagtaactttatttctgtctttagcgattttaagtgatgcggtaactatttgatctgaatcattttcaaatgaatcaagatagtaatttaaatcgtctaaattgtaaggagttatgaaaccgaatccgttatcttggaagaagtcgaaggcagctgccttcttcttctcattattcacattcttttcattattatctttattatcattattgtttgtgttggtttgatgttgttttgatgttggattgatgtttgactgatgttgttttgatgttggtttgatgtcgttttgatgttggttccttccctgctcactttgataaaagtcataattgacaatggttataagggtatattttgatgttgttttgacttctaacattccatcactctcgagtaagtcaaggaaggttttcactttaaatcgtgaccagttaaaaaggtcagacaaggtcaaaatcgatgttaatctttgtcctctttctacggttacaatttggtttccaataggcacttttgcctttgaatgattcgcttccatgagtaaatatatccatgcttcaaactttgaaaatgttctcttttctttaaatagccaatgattttgaattgagcgatcaatacttatccaaccagtcatatacacacctcactttcaaaccggttaaattagaatggtaaatcattgtcatctatttcaatcggaccatttgcattcgcaaacggattatcttttactggtttgttatttgaatattgcgattgtccacgtgtttgttgtacttgttgttggtataaatcttgttgagtgtcatttgagtttttcggttctaaaaattgaatactatcagcaataacttccgtaacatatacacgttgaccttccttattttcataattccgcgtttgtaacctaccatctacgcccgtcaacgatcctttagataggtatttattaacgttctctgcttgttttttaaatacgatgatattaataaagtctgcctcgcgctctccttgtgcattcgtaaatgtgcggttaactgctaatgtgaatgatgctacatttacaccactttgagtggttcttaattctgggtctctagttaaacgaccaactaatattgttctgtttagcatttataaacctccaacataaacgggcgcgcccgtcactttttgtatttcacttttaatgtattttgcatttgaattttgactacttaaatgaattaaatgtatttcttcgagtctagttaaatcatttgcttttaacattccgatagcatgttctaagctaaaatgagactccataattctgtttgctaatgtgctgtgcacactgccgttttttatgttttcctgcatttgttcatagatataattaacttctaacatcatgtgcgtaatgccgttaaatttgtatttcaaatactttgtatcagtaacatacagaaccttataacctaatgtactttgtaataagaaagccacaggctcgttagcatcatgttcgatgtcaaacggtagaattgaccatgtgcctattcgcagctcttgctttgccttaatcgtgcataagcgatgactttcaaaattcatagcttgttgtgttccagcagtcatatagctgattacaccattgtcgacaaactgctttgtgtactttgcatgatcaccatgttcgtgtgtgataagacaccctgctatatgtcttgttttatatttaaaatgcttttgaacacgttcaaattttatacctgcctcaagtagtaacgtagtacgtccatcatttaagacgtagcagttaccacttgaaccagttgctattgtttcaattaaaatggctcttcttcgctttctttttctgttgcaggttcttttatttcttcaaagtcagatacatcaataggcttatcattttctaattctgtgtattgtgcttcttcaagaactggttgttcaaagtccaattgttcttgatttgcattttcttcaacttctgcgtccaacacttctttgcgttgacgttgttcggattcttgtgcgtatttgaaaagattgctatctgttgatgtgttgatataacgtttagcagctctattgataactgtttttttagccatttcttctttgaaattattatgtgttttagaattttgtaatgctttttcatctttaatcattgatgactgcatccatgcttgtttaatttgttcaatagtcatgacttcaatatagttatctcgtccatcattaaatacgattgtgcagtacgcaccgataatgttttctttgtcgatgttaaagaagtcttgttcgtgtttaatcgctttgatacgtcctgtttctcccatttcttgcttgaatgtatcgcctttataaatcacttgagcaacaacatcttgagcacctgcatcacgttttaacatcattacattaccgtgatagctacgttgtaactgcattttgttgccgtaaggaataaagtagcattgatttttagctggatttaaaccttgcgttaccatgtctaataaggcatttgctttgcttgtatcgttacaactcattaatttgttatcttggctgatttgtaaccatgcttgtttcatggcattacttggtgaataatcatttggcaattccaaattgccttgtgactctaaaactctcactttgtttaatacgttgtcagatacgttcttttcttgtactaattgttgttcaatagtttgtaatttattattttcagtcattttatatagtctccattcttatttttttatcttgttcatttactatcaattgaatttgttgtgattctgttttgataagctctgttactgattcagcattatcaataaatattggcgctgtaactttaaaatgttttgacagtgtattgatgatatctaagccaacattaattcttgaggcgttatttaaaccgctgtcgtattcgacgccgttaaccgttgtggaacatgtttcttctaattcgccgttaactaaggtattgaataacttaaattcagcaatctcaaattcattattgatattttcagtaagcattttgacttttgttgttgtaaattcttttaagatataaaggtcatgtgaatacttttctttttcatccaataatctatcttcttcatttcttaattcagaaataacatcatctagatgtttatttgatttttcgattgatcttgacacttcaatttctgatttttcttgagtaagttcgcttattttgtcatctattcctgaaacgttatcttgaatagttttcctaatgttcgagcgtttttgattaatctcgtttatctctaacattactgctttgtattcgtcagtttgtgtaacgtcaacatgagtcgttttcaacttattaattttgttttgtattcttgctgaacgctcttctgcttcgttgattttaatttgtagattattgttgtcatcctctaacttctcgatgattggctttattttctttccttctgaaataatgtgattgatagatgtttgtattgtttctaattctttcgatttttttacattgaatttctgtaaagctttttctcttgcctcattcacttgttcagttggtaactgttgaccgcaacagctacatacattgtcatcaagatgttcaaatttttgatttttagatttttctaaatcactttttagtcctttgtgattttccaataattgattacgtctattttcttcatgcgtaatttgttgtttgttttgctttaatctcgttttaaggttcgcaaccgttccattttcaacgtgtaactcatttgttaaagcataaattttgttctcattacttgcgctgttattgtcttctatgcgtttcaattctgattgtttatcagctaattgattacgcaaattaatttcttccttaccgttttgaatatctatacgctcattttcaagttgctcaatttcttgtttgataattgcgtatctatcattatcgaattctggtacatcctgcttattttgttgtgtttgattaatacgtatcggaatatctttgatgtctttgttaatctgctttatcttgtcagtaagaatctttttctttgtttcaatttcatgatcaccaagaatattatttaattttttaaagtcgttatttgttttaatgacatcctcatcattaattggttttgcaatttcaaataacaaacttcttcgtttcttccaatcgagtaaattaaatgcttggggatttgtaatcaacttgaatacatcttcatcaattagttcatcaatacgagctttataatcctttacttttattgattcatcattgatatattgtttctttgttctacttcgtgagtattccttgcgattcgtcttttgatttattgtgtatttaggatgtgactcttttttgaaagtcgttatttttccgtcgatttcaaattctgcgaaaacagtcggaattaactcataattttcttcgtttttttcgtttaaagatacagggttaaatgatttggttgatccgtccaaacctttatcgaaaagcagccattgtaatgcggttgcagtcgtagtcttaccagtcgcattattgccgtatatttttgtgtctttaccgtcaaagttaaagctttcttctttgattccagcaaagtttgatattgttagcttatttatttttatatccatcatcatgctccttttttaatctttcggtgacctcttaacacctcgataattaaattttttattcgttcgtggctgtccggattgatttcatgtatctgtacaagcttattgttcgttttgtaactgtcgtgatagtgcaagaaattaatcgataagtatccgtgatgattacgttcaatttccaataatgctcgttggtttgacaaagtatattcgtcgaataacgttttaaaaatattcaatatatttctttctgtatctctcatgcttatacctaccatctcatgactaagttaattagcctgtctctttcgtctgtgttctcttcaatccattcataaatagattgatttaatatgtctaatgctgtgtatagatcattctcatctgttatatttatactgtcgataaatctatcttctaaatctaagacattcactagaatgctgtaatcttgtttcttaactgctaatttaaaatcgaatccgtctacattaattactttttgacatacatcgccaattttgtagtacattgttgacacttcctttatttcgttttatattgaatatgcattaattttctaattgtttagactgttactcattgccgtgagtaacagtttttttattcttcataaaagtattccttataaaatatgaatgttgcgatacttgcgaatcccgcaatcgaccatgcagtagtgaagtatagaaacggcataagtacaattgctaagactgtaaagcacagtactgctactaggtagcttttataaatgttgctcattttattctctccttatatatttcattgaaatgctcatcgacgaatttattcatctttcttgcgttaaatctccagcgattaaaattctcatctgggtaatgcacaattccttgcgctcttagttctttttcaaatctaggatgaaatagtaatctgtccttgatagtctcatcagatgcaatttttaatttcttctttaagtcactcatgttccatacagggtctaatgaataaccaattagctcatcatattcatcttttgtgataagtacatgtgtttcaggtattggaacggttacgtttaatacatgtggcatttctatcattcctttcgtgtataatgttgttatctcctacagagaggaggtgaatattatgaaaaactactatcaccttttgtctttcgatgacgatttagctaatgatgcagccaacgatctgttaaaagaaggttgggatatcgttcatgttggtacaaaattagttaaaattttggataatggacaagcgtactacaatactgaatacgttctgggcggaactaaaaatcagtatgaaaaatatttagaagattgccagcagtccgagttagattatttttaacttatgtttttctgcggttattagctaaatacttttgttctctatcaattaggtagagaacttttttaatttcagtgtaagaaaatttttctagttcaatacattgattaattacagacattaaattcttttgtttattatttaaattcttcttttggatttttaaagaataaagttctttcatatcttccatattgtttatgctcctttctgctatactcctattaaggaggtgaattcgtatgaagttaaaacacgattgcatacgtgaagttcttttagttatagagagtgatttaaaattaaataatgttctagataatgaagacctagaaaatacaattaaaaatttctcacgtgaagacatcgaatacactgttaaacaattgaccggtgcaggttatatagacgctgaattctatatggaaggttattttgttaaacatatgaatttttcaggtcacaaccttttggatgatgttagagatgtcgaagtttggagagaaactaaagctaaagcgtcaaaagtttcttcggtttcaatccctataattcaacaaatcgcatcgtcagtcgttaacaagatgctcgggctatagtaatttaaattcaacaccgtctatttgaacgaacagattatctaagtcaggtattttctttttatataaatcaaaccttgatttgatatctgctaataaataatgttccaaattcccaattgataatagtcgtctattaccttcttcgtcatagtagtaatagatgacttttttgttttgagcttgcattgttcgttcctcctgttaagcagttacgttagcttcataaccgaattcagtcatgatttcatgtattttcaatctgcctttttgtgtccatctagtttgtaaaactgtgtcttctctaccgtcagagcgtacaattgctatagtgtctgattctgtgtaactcttgcccatgtgttctgagtaaagcacccactgtttatttacttttcgttgtaatctagcttcgtgtagtagtttgtttaacttttgtgctgatataccgtagtctgccgcgatttgagttgtagctaatgtgccagttgattttaagatttcatcaacataatctgctttgggttttagctctccgatttcttgttgtaaaagtaagttttgctctttttctttcttatactcagtcaacactgtaatgatgtagtctggatcttttaatgtttgttcaattacattgtctgttgcgtagataccgtgtttgcgaatagctggtaggacatctgatgttacccagcgtttgaattttctagcggtttctctaattttttcgtttttgctttgtttagaagcatcgaagattagactgtataatcctgattcgttgataatgatcatatttctgttttgacctgatgcactaaattggtgcgtcagcttgtcctcgctatcaacatgatttctaatggcattgtctgctcttgcatatcctaaaatctcagcaatatcttttcctacaaaataaggttcgttttcaatttctactgttcttactggtagctctttaaaattaaatgtttgtaatgcttgcattgttcgttcctccttttaagatgtttgtacagttttatgtacattttgttcaaaaaaatatctacctacttttgttggtgggatttctaataattcacagattcgttttatttcccattgtgtgaataaattttttccttgcaacttgtgattaatagatgtccttgaaatagggattgcgttcgctaaagaactttggctatatctatactctgccattctttcgtacagcaaactataatcgaaattgtatatcataaactcacctcccttcttgttcggttttctgtacaaatcaattaaaacacctttgtttaaataactcaacacataaaatacatttttctgtacaacatttgttaaaaattattgataatcgtcattgtacgtagtattatattcttaggaggtgttcagaaatatgaacagttttaaggatagattaaagcaaattatgtctgaacggaagatatctcaatcagagctatcaagaaggactggtattggcagaaactcaattagcgattatttaaatggaaaatatgaagcgaaacaagacaaagtctttgaactagcaaaggctttaaacgttaacgaagcgtggcttatgggttttgatatttctaagaatagaaaaattgaaaataacgacatcgcttccatatacagtaaactcacgcctccaagacaaaaaaatgtgcttaactatgcaaacgagcaattagatgaacagaatactaaaggcgataatattgtcgatattaattcatataaacaggatagaattgcagttaacgtcaatggttgtgtctctgctggtgtaggagaacgtctacacggtgaaacattgtttaccgaaatggttaaagcacctatcccaccacatgatttagcattaaaagtaaacggtgattctatggaacctatgtttaaagacggtgaaattatattcgtagagaaaactcataatataaaaaatggccaaattggtatattcattattgaagaagaagcttacgttaagaaagtttttgttgaagatgatagattgactctagtctcactgaacaaagaataccgcgaccttcacttttatagaaatgaaagtgtgaggttagtagggaaagtaattttataggagatagtaaaatgaaacctagaaagcaagatgaaaaaatattatcagatcaatacagttactttgaaccaataatcagcgacagttgtgacataaaattcgacggagacaagaggagaattggttctatattcatttcacatgaggaaatttgttttataaggaaagaagaagattatatatttaaaatttcgttatcagacgtggtagattacaatactgttgttactatttggaaaaaccaagcttctttaacattaaacgataatagaaaaataacgttttatttcgtaacaaattctcctttaacaggatttatctcaattttaaaaacttatatgcaattatctaggaatagggaaacaattattccagatgataatctacttattaatgatgacgatgaacaaactaaagttgaaattttcgacgtcgtaggattaaattatgagggtcgtagaaaagaattaaagaaacttatcaaaaaaatgaaaactaacgacgctttctttttcttgtatagtgatttgaaagggaatgaacttaaagaagaattgctttatgaagacaaggtgtatgaaattcctgattacgaggttattcctggtgtattcttacaaaaagaaccggataatccttatgatgaaaacgcgataaaagttatgatttcaaatgaatactctgaatttcacgttggatatgtgcctagagagtatgcttcaaggttagtcaattatatagaagacaccgtttcttgtaacgcatatattaacggtggtaagtataaaactttagattatttagaagagaaaattgttactaaagaatcagactatggattacgaatacatgtagaatataaagtttaatcaaaaagacgtctatttcagcagtgtttgaaaggaagtttataatgaaaataactaattgcaaaataaaaaaagaaactatagtatatgaagttttaactagtggtaatcaaccattcacttatgagttacctaaagatttatcgtcacataatgcgcgtaaatacttggaatttatttcacaaaaattagatggcgataagttaaccaaagaagattcattatgattttactaaacaaaaaacgcctacaagtgtagacgttgaatggtggtgagaattttatggcggataaaaacaaaaaacaagaagctactcgtagtaacccaataaacaaaagttttgaaaagccgggtgccagcgaaaacttaaaaagcactttatcagaaaaagctaagaaaaaagattaatattcattcattaaatataaatccaatttaatttgttgtttaaggtctacaagtgtatgtttaatatacaattcatcgtttgacggtaaatcagatactttgaaatcttgtcgctcaacctctagtaaatcgaaatcgctaccagctgaattataggttttaagttcaccctcttcaatgattctgttttcaaagtctttaataactataaatactggtttaccgttgttattaaacaacttgtctcttttgtctaataagcttatacaatccaaattcataaactttcttgtttcattaattaaccagataatgaatttaacaattaaaggattaaatacaagcactgttaaaacaaaaataattagaaaccaaatatttgcttttagacctgtaagcaactgaagtaaactcaaattttttaaatcaacattattaaaaattataaaagtataaaaccatatcaaacatgtttcaatagaaaaaatcaataatacaggagtattgataatcttgtttttttcactaactaaacctatcattgttagatatttatatggtatgtaacctaaaactcctgtaagaagaagcgcccctagaaattgagtcatcttatcacctactttttattttattataacatatttagtacctagtactaaattttgggtagcccccctacccttattattttttgccaattttgaggagggaacgcatgaaaacacgttgttacgatggtaaaaaatggcaatatgaatttaagcatgaaggaaaaagataccgtaagaaaggttttagaacaaagcgtgaagctaattctgctggactagacaagttaaatgagttaagaagtggttttaatatagataactatataactcttgcagaatacttcgaaaattggattaaaacatataaacaacctgttgttaaagaaaatacctaccgtcattatagaaatgcattacaacatatacaaaaacataaaataggtaaaatggagttatcaaagataaatagacaagtttatcagaaattcataaacgactattcaaaagaacacgcaaaagaaactataagaaaaacaaacggtgctattcggtcagctttagatgacgcattatatgatggacttatttttaaaaaccccgcttataaagttaattataaagccggaaaacctacgaagtcagaacaagaaaaattcatctcggtaactgaatatgaaatactaaaagatcacgtcagaaagaagagaactcgttcatcattagcgctattcataatgatttgtacgggttgtcgtgtcagtggtgcaagaaatataaagattgagcatatcaaccaagtgaaaaacactatatttattgacgagcgaaaaaccgatacttcccctagatatatcagtatcgctaaatctgatatgaaacacattatggacgtcataagtacatttgcaattagctatgatggttacattttcaaagaagccggatctataattaaccttcaggctatcaataatgctttgaaatcagcctgtagagtcaataatataccaattattacatcgcacgcattaagacacactcattgttcttatttactagcaaaaggtgtatctatacattacatttctaaaagattaggtcataaaaatatagcaataactacatccgtgtattctcatttgttagaagaaaaatttaatgaagaggacaaaaaaacaactaaaattttagaaagtatgtaatttagggacccattagggactccaaacccaataaatactgttgttacaaggtttctatgtatccaaactggggacaatataaacgcgctgatttaatcggacaatcttcttatattaaaaataatgatgtcgtaatattcaatgaagcatttgataatggtgcatcagataaattattaagtaatgtgaaaaaagaatatccttaccaaacacctgtactcggtcgttctcaatcagggtgggacaaaactgaaggtagctactcatcaactgttgctgaagatggtggcgtagcgattgtaagtaaatatcctattaaagaaaaaatccagcatgttttcaaaagcggttgtggattcgataatgatagcaacaaaggctttgtttatacaaaaatagagaaaaatggtaagaacgttcacgttatcggtacacatacacaatctgaagattcacgttgtagtgctggacatgatcgaaaaattagagctgaacaaatgaaagaaatcagtgactttgttaaaaagaaaaatatccctaaagatgaaacggtatatataggtggcgaccttaatgttaataaaggcactccagagttcaaagatatgcttaaaaacttgaatgtaaatgatgttctatatgcaggtcataatagcacatgggaccctcaatcaaattcaattgcgaaatataattaccctaatggtaaaccagaacatttagactatatatttacagataaagatcataaacaaccaaaacaattagtcaatgaagttgtgactgaaaaacctaagccatgggatgtatatgcgttcccatattactacgtttacaatgatttttcagatcattacccaatcaaagcctatagtaaatagtgctcaactaactaataactcgcttcgttctaaaaggacgaagcgagttatattgttaaaatttgaattgactgagtctaggacataaatcaagttctaggctctataatgttatggtattagttgactgcgtgatccaaacacagagaatttcgaaaagaaattggaacaccaatttctacagacaatgcaagttggcggggccccaacataaagaaatactttttctttagaaattagtatttcttatgcatgagttttactcatgtattcctatttttaagtacatattagctgtggctaatgtgtaagaaccactacataataaatcattagtggctctttatcatttctgttccactcctatatttcttcattaatatagatacttcgtctgcacttaaacaagattcatacactgcacatcataataaatctatctattcaaatataaataaaagttacctactacattctatgtagcaggcaacttttattacttatttcttttcattatcattaagtacttttacaaacttcacattatgtgtcttccaatcaacttcatataatgctgataatttttcttcttttttatctacatggttttcaccagaccaatagccccagaaaccatgacgattccaatctattttaaactcatccattgatcttttataatgaacaacaaattttgatttaccttcatcttttttatcatgtgacataacagctaaaaattctggattaaacccttcagaaacagttacaggcatcttattcttaggcgtaaaattatctttcgcccataaatttccatttcgtgttaaagaaaagatttcacttttagttctattatcactatcattagttaattgtctcgtatggtcatgtcccatattatttatcaaatgtgcttctactttccaacctacacctttatgtgacgtagattgatcaagtaatgtacgatacgatggttgttgataactaatcgtctctgaataattactctcttttgtaatatttccagttaaccctccacgattaatcgaaaaatctccacctgttttataaccatacgtatatttaacttctcttgattcatcctgattttttggtgcaaagtcagtcacatttgtattgttgttgtcatcaacattttgaattgaaactgaataagatccaggccatcttaatgtactattccaataaccatttgggtctagaattcttaaaccactacctattgttcctttcgctttaataaatactgtttctttatcataattaggttcagttaagaagttaaattgtaagctttgagtaatatttttttgactatcacttgttgtagctgtacgtgtatacattttagtatcaccatcaagattcttctcagaaacagctttaatttcagaattaatttttgcataagaagtagctggtaatacagtgaaagtagtcgatagtgctaacgtacaaattgtgatatttttatatagttgtttaatcatttgtaatccttcccttcgattttatccttctctaaatgatttattatcagagtatttatcaacgactttaactgttttatttttccaatcaacttcataagtgacaattaatctttgaccttctttatttttttctaaaattggagatgcataatgtattccaggtctgtttttcaaaatatcttgatttcgtgtgtatgttacttcaaattgcgttttctcatttgacttttcattagataaataagttaaaaattctggattaaagccacttcttactaatgctgggtatctatattttgaagcaaagcttagttcagggttttcaacagtagcaattctcgtatttctatagaataataattcatcatttctatttttcacttctccaccatacttcaagtcattcgcaataactgaccagtgtacatgccagttattatttttaccgctggcaattgtgtcataattttgctgattataactaatcgttttggagtagctatttgatgaagttcgtccaatacctttcgttgaatcgaatttaccacctgagctatatgaaaatgtactatctactttcgcagttgaaattttatttttcggcaattggtctaatatttcagttttaggatttctttttacttgaaaatctacatggtactcacttggatactttaaccaatttgaatttttttcttctttatgagattcaaactttaaatttgaatgaattgagccttgttttttaacaagtaatacattcttgtcataagttggatcatcgataaagtcgaattgtaaattttggagtatatttgttttctcatcatatactgtttcagttcgttttgtgattttaccgtttttcccaatatcatccggtgctgttgaatttttatctttattagtaacattacgtttgtctttttgttgagacttatcaacatgttctttcttattttggtcttgagagtctttatgagctgaatttgcttgagtcgttgctgctgataacaataaaattgcacatgataatgatgacgctattaaaacacgttttttatttttcattgttataaccttctttcgtatgattgatatttgttgatatgtatcgacatgtgaataatatcacaaaaacagagaatatatatttaactatttattaaatgattttgttaatattattaaatactttatcctctttaaaaataatgtgtgtacaaagtcattaatttagcaaatatttttatttagtagttaataaccatcgatttgaaatttatatataattattagctaaataatatcctgcatctttctcatacaatttactataaaattaagcatagccgatatcagtgttaataagatcgtagatactagacagtaaatttcatagaacgaaatcaaataacacactactttctgcattttaaattatgtttaagaataaaaattatgtttatataaatatatatactactttgaaaaggtgtgagcttaatgacaacttttagtgaaaaagaaaaaattcaattactagcagatattgttgaactacaaactgaaaataataatgaaatagacgtttgtaattatttaaaagatttattcgacaagtacgatattaaatctgagattttgaaagttaatgaacaccgcgccaatatcgttgcagaaatcggtaacggctcacctatactcgcattgagtggtcatatggaggttgttgatgcaggaaatcaagataattggacttattccccttttcaactcacagaaaaagatggcaaattatatggtcgaggcacaacagatatgaaaggcggtctgatggctttggtcatcacactcattgaattaaaagaacaaaatcaattacctcaaggaacgataagattactagctactgctggcgaagagaaagaacaagaaggtgccaaattattggctgataaaggctatttagacgatgtagatggcttaattattgctgaaccaactggatctggaatttattatgcacataaagggtctatgtcatgtaaagtaactgcaactggtaaagctgtccatagctcagttccatttattggtgacaatgcaattgatacactgcttgaattttataatcaatttaaagaaaaatattcagagcttaaaaaacatgatactaaacatgaattagatgttgcacccatgtttaaatcattgataggaaaagaaatttctgaagaggatgcaaattatgcatctggtcttacagctgtatgttcgattataaatggcggcaaacaatttaactctgtaccagatgaagcttcacttgaatttaacgtaagaccagttcctgagtatgataacgactttatagaatcgtttttccaaaatatcattaataatgtggatagcaataagctttcactcgatattccaagtaatcaccgacctgtaacaagcgataaaaatagcaaattaattactacgattaaagatgtagcttctagttatgtagacaaagacgatatatttgtttcggcgcttgtaggtgcaacagatgcctctagtttcttaggtgataataaggacaatgttgatttagccatttttggaccaggtaatccattaatggcacatcaaatcgatgaatatattgaaaaagatatgtatctgaaatatattgatatttttaaagaagcttccattcaatatttaaaagagaaataagaacgatgctgtcagctgccctattcgcgtgctggcagttttttattttaatttgttctttagttattactcatcatttctaactgaatcaaaaaagtaagattcaagaaaattaatttttctttatgaaaacatataacttaacaaaactaacctttagttttaaggtcaggtgacaattcctcttgtaaaacattaattgatagtttaattaacatcaatgttgtttaagtttttcatcattcatcctgcccttttaaattaattattaaccaacttgagaaaattaaaattcaatacttttttccatttactcttgagaagctagtccgtataaattaacacaagtcatttgtactaatttaaatatcttaatgctgcctctacttaatcacctcaaagcttctcaagtaatttacatgcttttgtgcttatttttcatacaccagataatacaacaactttctatttaaaatcatagcttctatatcatttataacaacgaatgattcaccaactcttacaggtaaaactgcaattaaaactaatgaaaaattttcattagttttcgaagcctcttttgggtgtgattagaattacagtagtaataaaaatagctatcattacacgtattccagttgttattatttaaaatgtaaaaataacaactattagataatacatacaatatttaacagatacttttgattaaatattatgaactaataatttaatattccttttaaaaccaagtgagcaaattttatgattaacattgataatataataatcataccgacatagttaaatattttaaaatctatagccattttttctccatattttttatctaatttaagtttagtattatcatctgataaaacaactcgttcgaatgattttggtaaaaattgttggaataatattgttgtcaaactaacgatgaatacagttatttctatgtttttactattaaaaattttgaagaataatatatatattgcaaataacaagtaaacttcagttgcaaatgtaaaagagataatcgaaaaaatcttttgagcactattagcaaattcataatttttcttaatagcattgaaatagtacagaactattaaaatcgtcaaaaaaattattatcaaaaatgttattactttgtccatataatcgccttccaatcaaaatcagcaatgaaacattaaatctgattttacaaatttttttattataatttacatttaaaaattaataaatatttataaaagtcatacatatttcttcaatcaaattcttttcgtttatatctaaatacaaattaatcacacactgttgaacaaaatgactatactaggaaattttcacaatctgttaaaatttaccaaataatattgtataactttcaaattaaaattctatctaaactttacaatagaaagtgaaggtaattattcatagtcgacttagttttcttcaagttagtcatatccatgatctaatattattagcaatcttcataataaagataacacaaatctcaaaatttttaatacagcaatattttacaagtcaaattatatataaatatgataaaaattcatttgctttactaactcattcactttttaaatattttctctataacaataatagtctatagcagttgatgcgcttctttataatataattattaaaaaaatgaaaaaacattatgcataatcactattgagataaacataagtaaaattgtgatataaaacagtagtaacaatccgtaaaaaagccttccaatagcttagtcgactaatggaaaacgtctcataaaaaaatatattttcgtgtattctaatgtttacttgtaataaatcataatcgtccaaaatctcactttttagttagtaaaaatcagaaaatgaaatatatctcagggccaattaaaaatattaaaagaattagtcaacacctgtcagtaatacacatcagtaacatttctattttcatttatgatattatctaattattaatttataatataaaggagtatgaaattaaaatgaacaaagtccacaaacctttatatttttatttaatgcttttcttctctacaactatcataggtgcacttttattgtatttaccttttactggtaaaaagccaatatcttttttagatgccctatttatagcttcaagtgcatttacagttactggcttgtccccagttgatataggatcacagtttaatatacttggtgagatagtaatactattattaattcaaataggtggtctgggtatcgtgaccgtaaccctattgacactagtatttttaaatagaaagatatcaatgaaaaatagattcttgattatggttacatggaatattgacgaacctggtggtgttattaagctaattaaacacttggctatttatagtttagtcactgaattaattggtatgatttgtttgtgtttatcttttataccaaaatttggtataggcaaaggtttatttttaagcttattcacatcagtatcagcttttaataatgctggatttgccctttttaagaataacttaatagattattctagtgatccaattgtcattattacaatctcaatactcataatatttggaggtattggacattttgtcgtgatagactttattaattgtaaaaaattgagtaaattatctttacattctaaattagtcttaactacaactagtatcctaataattataggagctattacattctttttattagaacagtttaatactatgcaacatatgggactaattgaaaaaatcggaaattcttttttccaatcagtaacaacacgaacagcgggttttaacagtattgatatagcaagcattaacaaatctaccgccttaatgttaatgttacttatgtttattggtggtgcccctctcagtgcagctggaggaattaaaataactacttttgcagtggcgtttatatttgttctaaattatatacgtaaagaaaataatgtttcagtattcaataaagaaatatctgacaaacatataaaactatctattgttaccattaatatctcatttctatttatcagtatcattacttttatattatcgataattaatccgaacatatcattaatcaagttattattcgaagtggtttctgcatttggaacagtcgggttaagtatgaaccttaccacagaatatcatggtattactaaaataattattatattcgttatgctttgcggtaaagtaggactattaactttattaagaacatttataccaccaaaaagtcctaaaaattaccgctacactaaaggacaaatttatctataaaataactatccatctttaacaagaaatgaactagtgttttaatttattacatttaaaaaactacctaaacaggtagttttttgttttttatttattttaggcccattaaatgtcttatgtctttaattaagtaaaatgcacaagtacacctttaaaaagatctactcaaaactaaactatacctagttaaccgcttgtgattaagaaattttaaatgtggtttcttttaattatgtcaaccacccataaggattttaatcaagcactcattcattcctgcactcgcaatatgcattacttatagaagttgatgtactctcatattaagggcaatacaataacttccgcaccacaatgatttaagaatctcaataacacatcagcacataataaagacacctctcataagtttagtcaactaatggaaggcgtctcgtaattaaaatatatttacgtgcattctaatttgtacttagaatgaatcatactcgtgcataatgtaattttctagttagttagaactataaacagttttacatcattcctggcatgccacccatgttaggttggtcattatttttttctggaattgatgctacaaccgcttcagtcgttaagaacattgccgcaacacttgctgcatgttgtaatgctgagcgtgttactttagttggatcaacgatacctgcttctaacatattaacccactcgtttgtagcagcgttaaaaccaacacctggttctgcatttttcaagcgttcaacgatgacagatccttctaaccctgcattttcagcaatttgacgaactggtgcagttaatgctttaagtacaatatttacacctgtttcaatgtcaccttcagcttcaatttcacttactttttggtaaacatttactaatgcagtaccaccacctgcaacaataccttcttctactgctgcacgtgtagagtttaatgcatcttcaatacgtaatttacgttctttaagctctgtttcacttgctgcacctactttaataactgcaacaccacctgctaatttagctaagcgctcttgtaatttttcacgatcaaagtcagattcagtttcttcaatttgagatttcaattggcttacacgtgcatcaatgctgttttcgtcaccgtcaccatcaacaacagtggtattatctttagttacttctactttacttgcagtacctaacatatcaattgatgcatcttttaaatctaagcctaaatcatcagtaatcacttgcgcaccagttaaaatagctaaatcttctaacattgctttacgacgatcaccaaaaccaggtgcttttactgcaacagcagtaaatgtgccacgcatacggtttagcacgatatttgttaatgcatctccttcaacttcatcagctacaattaagattggacgattagattgaaccacttgttctaataaaggtaagatatcttggaatgatgagattttcttatctgtcactaaaatatatgggcgttctaattcagcaaccattttatctgaatcagtaaccatatacggtgattgataaccacgatcaaattgcataccttcaaccacttcaagttctgtattcaagccatttgactcttcaattgtaatgacaccatcgttacctactttttccatagcttctgaaatatagcgtccaatttcttcatctgctgctgaaatcgcacctacttgcgcaatttcatttttattttcaactttttgagaattttcatgtaacgcttcaacagcaactttaactgctttgtcgataccttgtcgtaaaccaactgggttcgcaccacttgtaacatttttcaagccttcttgaatcattgcttgagctaatactgttgcagttgtcgtaccgtcaccagcaatttcatttgtcttatttgcaacttcttgaactagtttagcccccatattttcatatggatcttctaattcgatttctttagcaatcgttacaccatcgttcgtaattaaaggtgctgtaaactctttatctaatacaacattacgtcctttaggaccaatcgttactttaactgcatttgctaattggtctacaccacgtaacattgcttgacgtgcatcttcagagaatttcaattgtttaaccataaatgataaacctccatttgtttagtcatatttcattttcgttctttacaatttatctatgaatttagttttatattattcaattaccgctaaaatatcttcttcatttaatactagatatgtttcattatctcgtttaacttctgtaccagcatattgttggaacacgacacggtccccttctttcacttcaggagtcactcttgtaccatcatttaataggcgtcctgttcctactgcaacgataacgccttcgtttgatttttctttagcactatcagttaaaacaataccacttttagttgtttgttcttgttcttttttctcaataatcacacgatttccaattggttttagcatgattgttcctccttaaaaaaacctaaagtttagcacttaacattaaagagtgctaacatacatttataataatcaaatttggtcaaaatttcaagtcataaccttttaattaagttttgtaacttcaagttatttacgataaaataaattataaacaaatatttggaggaaaattatgacaagactatgggcatcattgctaactgttattatttatatattgtctcaatttttaccgcttctcattgtaaaaaaattaccatttgtacaatatagtggcatagaactgactaaagcagtcatttacatacaacttgttctatttttaatcgccgccacgacgattattttaattaatttaaaaattaaaaatccaacaaaattagaattagaagttaaagaacctaaaaaatatatcattccatgggcattgcttggatttgcattggtaatgatttatcaaatggtagtgagcattgtattaacgcaaatttatggtggacaacaagtaagtcctaatacagaaaagctaattattattgctcgaaaaatacctatatttatcttctttgtatctattatcggtcctttattagaagaatacgtattcagaaaagtaatctttggagaattatttaatgcgattaaaggtaatcgtatcgtagcatttattattgctacaacagtaagttcattaatatttgcattagcacataatgatttcaaatttattccagtttattttggtatgggtgtcattttttctttagcatatgtatggacaaaacggcttgctgttccaattattatccatatgttacaaaacggatttgtcgttatattccaattacttaatcctgaagctttgaaaaaagccacggaacaagcgaattttatatatcacatttttattccataatataaaaaacgaatcacacacggattatcgtcgctgtgattcgtttttatttttctttttatttcgctttacaaataagaatagcatgattgaaaataccaccatcatagaacatacaattgctagccaacttttactatatgcagttgacgcacttttcttattatcttcttgttttttaactactgtaaaatcgtctttttcatgcggttcaaatgagcgttgctttgaatccggcttatcttcgggctttttcaaatctggcattgatccaatttcaccagtaattaatgcgagtacttgttcatctaaattacgatagtacctttctgatttcaatggattgaaatattggaatctaaagtaattcgattgttgttgtaatccatttaaataagcatttccgctgaagttttgtttgcgaataatattataaatgtcttcatcagtaacttctccataatctttgcccaacttattaatttgatttaaaatatacggattatacttgtaagccccattcgccaaggctaaaaatcgttgggacacaaaatcattaccagtaggattttgtgagtttccttgatttccatttggttgccattgaccttgattagatccatctgaagcatttgggttccatgttcccccatttttcgagccaccagaatgattggaatccccaggttgattgggatttggtgacgggttaggatttggcttatctggatctggttttggatctggatttggctttggcttatctggatctggttttggatccggttttggctttggtttatctgggtctggttttggatctggttttggtttcgggttatctggatctggttttggatccggatttggctttggtttatctgggtctggttttggatccggttttggtttcgggttatttgggtctggttttgaatctgtacttgggttttggttgtttgagtctggcttcacattattcgaatcaggattagcatcacgactattcgaacctgttccttcattacccgtttgatttgattcgtgaggtgtcccagtctcattattattcatttcactatttactgatggtgaagttatattatgattcaaattagtagttggtttttctccatttaagttatcctttgcttcaactgtgtgcgttgcaagccctaaactactactacttaaaattaaaatacttgttgaaagtaacattttcttaaaccaatgatatgacatttcacgagacacctccctttttcatgtaagtattaatctaagtataataaatatgcgttgaaaatgcatttatatttggaatttgaaaatgaatattaatattcttgaaattttcgtaaatattactttacaagtacaagtataaattttatacttagtctattaagtattctttagtaaagaaggagcaataattatgggtttatttaaaaaagataaaaaagcaatgacttttgacaatgcaatggaagaaagacgttcaatatataatttgaaagattcgatatcaattagcgatgacgaattagaatcaatgattgcacatgcagttaaacatgttccttcatcatttaattctcaatcaactagaattgttctcttattaaatgacaacaataataaattttgggataacacaaaagcaattttaaaagaagtcatgggagagaatcgtgatttcgagccaactgaacaaaaaattgataacttcaaacattcatacggcacaattttgttttatgaagatcaagatgttgtaagtggtttacaagaacaaatgccaaactactatgataattttgcaatatggtcaactcaaacaaatgccatgcatcaatttgcaatttggactgcattagctactaaaggcataggtgcttcattacaacactataatccacttgttgatgagatgacttctaatgaatttaatattcctaaaagttggaaacttattgctcaaatgccatttggtgatattcgtgaagctgctggcgaaaaaacatttaatccagtggaagatcgtttcgtaataaaaaaataatcaatatattgttaggaatgggacagaaatgataaagaatcattagttattcattatgtagtagttcttacacattagccgctgctaatgtgcacttaagaataggaatacatgagtaaaactcatgtataagaaatactaatttctaaagaaaaagtatttctttatgttagagcccaccccaacttgcattgtctgtagaaattggtgttccaatttctctatgttggggccccatcaactactgtcaatataacattgtagagcctaggactttgattttatgtcttgggctcgttttttgcgtttcaacataacttttagtaagttatatataagatctatcaaggatgtgatgttatgaaagtccaaatttatcaattaccgattatttttggagatagttctaaaaatgaaactcaaataacgcaatggttcgaaaaaaatatgaatgctgaagtagatgtagtcgttttacctgaaatgtggaataatggctatgatttagagcatttaaatgaaaaagcagataataatctaggacaaagtttttcatttattaaacatttagctgaaaaatataaagtcgatatcgtagctgggtcagtttctaacattagaaacaatcaaatatttaatacagcttttagtgtgaataaaagtggccagctaattaatgaatacgacaaagttcatttagttcctatgttaagagagcatgaatttttaactgctggcgaaaacgtagctgaaccctttcaattgtctgacggtacttatgtgacccaacttatctgttatgatttacgttttcccgaattattaagatatcctgctcgtagtggtgctaaaattgcattttatgtggcgcaatggcctatgtcacgtcttcaccattggcattcattactaaaggcacgtgcaattgaaaataatatgtttgtcattggaactaatagcactggattcgatggtaacacagaatatgctggtcattcgatagttataaacccaaatggagatttagttggagaattaaatgaatccgcagatattttgactgtagatttaaacttaaatgaagtagaacagcaacgcgaaaatatacctgtatttaaaagtattaaattagatttgtataaataagaagcgcccgaaataatatttaacacatgtcatgactaaacatagatttatgagagatttttcataagtctatgtttatttttttataatagataactcagtaagaatccatttcgccctttgcaaatgaatgattttcttaattaaattgattaattttttgaccttttccaacattagacttattcatatattttaacggtgggtctcataatgaggattaactctccccttctttattacaataaaaaaggccgcgagcttgggaggggctcacgaccatacttattattaagggaatgttttacagttattttttcaatctatttttggggatgttattaattatgaaaaaaattttatttatcaaataatgataaatcgatgttgtttacgatagcttacatgctagaaataattatctgtaatgataattaagaaaaatacatagcactgagtccaaggaaactaactctactagcaaatgttactcacttgctaattttacatggttattaagttgggatggcttaataactcatacttttagtactatacgaagataacaaatttacaatgaaagtaattaattattcatcttattttttagtgaatttgttcactgtgtcgataatccattttactaagtcaccgattgttgaaatgatatcttgtgccattgaaatcactccttccttaattaagataaaaattcttaaaattaaacaactcatcaactattttccatcacatctctgtgatctagttatattaaaacatgctaaaagcatttattttccaatttttcttaactagtcgttttttattcttaactgtaaatttttttatgttaaaatattaaatacaaattacatttaacagttaagtatttatttcctacagttaggcaatataatgataaaagattgtactaaatcgtataatgacagtgaggagagtggtgtaaaattgaattattttgataataaaattgaccagtttgccacgtatcttcaaaagagaaataacttagatcatattcaatttttgcaagtacgattagggatgcaggtcttagctaaaaatataggtaaattaattgttatgtatactattgcctatattttaaacatttttatcttcactttaattactaatatatcgttttatctaattagaaggtatgcacatggtgcacatgcaccttcatctttttggtgttatatagaaagcattacactttttattgtgctacctctattagtattgcattttcatattaatgaaacactaatgatgtttttagcattaataagtgttggagtagtgattaaatatgcacctgcagccactaagaagaagcctatcccagcgaggcttgtaaagcaaaaaagatatttttcaattataattagtacaattcttttcattatcacactttttgtaaaagaaccatatacccaatttattcaactgggtattattatacaagctattacattactaccaatatactattcaaaggaggactaaattatgaaaaaattactcaacaaagttattgagcttttagttgactttttcaacagcatcggttacagagccgcgtatataaattgtgattttttattggacgaagctgaagtaccaaaagaattaactcaattacacgaataactataagagaaagtgtgatagtaagtggaagcattaaatgattataattacgttttatttgtaattgttcaagtttcattaatgttctttatatctgcatttattagtggaataagatacaaaaaatcagattatatatacattattggaatagtgttatcttcagtatatttctttgacaaaatcggaagtatttcactagttgttataacaatttttataataatttttctctattttaaaattagactatattctgtatttttagtaatggttactcaaatcattttatattgtgcaaatttcgtttatatcattattttttcatacattataacaatttcacacagcgtgtttatagttctaccaatctttttggtagtgtatgtatcaatttcttatgcacttgcctacattttaaatagaatattaaaaaggataaatggtacatacctttctcttaataaaaaattccttactgttataactattgttatagtaataacattctctttgttatttgcatattcgcaaattgatgcgagtgatgcatcaacaatcaaacagtattcgattttattcttgggaattattatattactgagtatcttaatttttatttattctcaatttactcttaaagaaatgaaatataaacgtaatcaagaagaaattgaaacctattatgaatacacattaaagattgaagcaattaataatgaaatgcgcaagttccgtcatgattatgtcaatatcttgacgactctttcagaatacattcgtgaagatgacatgaccggtcttcgagactatttcaataaaaatattgtacctatgaaagataatttacaaatgaatgctcttaagttaaatggtattgagaatcttaaagtacgtgagattaaaggtcttctaacagctaaaattttacgtgcacaagaaatgaatataccgattagtatagaaataccagatgaagtaactcgcattaatttgaatatgatcgatttaagtcgcagtattggtattattcttgataacgcaatagaggcatcaagtgaaattgatgatcctatcattcgagttgcatttattgaaagcgaaaattcagtaacgtttattgttatgaataaatgtgcagatgatataccacgtattcatgaattgttccaagaaagtttttctactaaaggtgaaggtcgtggtttaggtctatcaactttaaaagaaattgctgataatgcagacaatgtcttattagatacaattatcgagaatggtttctttattcaaaaggttgaaattattaacaactagccataaggatgtgaatgtatgaaaattttcatttgcgaagacgatccaaaacaaagagaaaacatggttaccattattaaaaattatataatgatagaagaaaagcctatggaaattgccctcgcaactgataatccttatgaggtgcttgagcaagctaaaaatatgaatgacataggctgttactttttagatattcaactttcaactgatattaatggtatcaaattaggcagtgaaattcgtaagcatgacccagttggtaacattattttcgttacgagtcacagtgaacttacctatttaacatttgtctacaaagttgcagcgatggattttatttttaaagatgatccagctgaattaagaactcgaattatagactgtttagaaactgcacatacacgcttacaattgttgtctaaagataatagcgttgaaacgattgaattaaaacgtggcagtaattcagtgtatgttcaatatgatgatattatgttttttgaatcatcaacaaaatctcacagactcattgcccatttagataaccgtcaaattgaattttatggtaatttaaaagaactgagtcaattagatgatcgtttctttagatgtcataatagctttgtcgtcaatcgccataatattgaatctatagattcgaaagagcgaattgtctattttaaaaataaagaacactgctatgcatcggtgagaaacgttaaaaaaatataataagataataaagtcagttaacggcgtattcaattgtaaatcttgttggattttaacaagataactagcaaatgcactgtatagctggctttttaattgtttaataacaaaattaaatatgacgcgtgaattaaaaaatgatgtaacgtttctttgtatacctattcctattactacataatttatcaatttctatttcactctacaatcctatggcgcaatttttaacaaaatatactaaatttgaaattgacagtttccataaataaaatgctacaatttcctaccccgtgaatcttattttgttttaaaaaacagtgtagcacaagattcaacttgtttcctacactgttttataaatgaattatttaaaatgcttgttcaacctcttgtaatgttggcaaactattaatagcaccatacttcgttgtcactattgcagcaacgcgattgctaaacgctaaaatttcctcaccttcattttcaaataactgagttaaatttaacacatcggttgctaaaatcctgctaataactgcaccaataaaagcatcccctgccccagttgtatcaacaggttttaccttatagccactatgataatgattaataccatttttcaaatatacggcagcaccatctgctcccttcgtataaatgactacagtaacattacctgtaaataatgattgaatggcttcattttcatcatgaatacctgtaataaattctaattcttcatctgaaacttttacaatatgcgccaatggcaaaaaggtatgaatagtttgtcttaaatcttcagcgttatcccataatggcaatcttacattaggatcaaatacgacagtaccatttgcatttaatgttttggtaatcaattgataatgtgtatctctcatcggactatcgaccaaatcaacagaacaaaaatgtactacatcattttcattcacatcaatatcattcacaaaacttggttcaaataacatatcagcagagggcttacgataaaaagaaaaatctcgctcgcccgcttcagtcaaactcacaaaagctaacgcagtgtttgcttcattcgtgcgatacacttttgatacatctacaccaatacttgatatcgtttcaataatgctatctccaaatgcatcattacctaattgtgtaatcatatacgcttgttgtcctaacttttgaactgtacaagctacattgcatggcgcgccaccaatttgcttcgtaaatgtttgaacatcttttaaattcgcatttgtaacatttggaataaaatcaattaacgcttctcctattgaaaatagacgtctcatttatgttcatcctttaaatcatatttagtaaattgtaaatatacttgccctgattctgttgatgttttaatacctagtgcgtcttctgtcgggaaaattcgagatgtcaaaacacgttccccatcattacagaaaatttctatactagatgtatcaacaaaaatttgtaattgctttaatggcgtgtctaatatcgtactacgcgtcgtaccttcaacatttgtcggcaataaaccactgtcgctgcgatctaatgttattttattttcacgcttgttataagcaattaatgttgaagaagtcttagatgtacgtaattcaaagtacacttcggtagcatcattatccaaaatatctatgattaattcatactgtttaccttcatacggatgtaattttcgagtaaatttatttgcgtagcctaatgctgtctctttattgtgacgtaatttttccaacgctggatatggacgttgcttaagttgaccattttctacatttaatacacgaggaattgttaagcaatgggcccatccttcattatcagtaggatattcgatttccggtaaccccatccatccaattagtactcgtcggcctttttcatctaaaaatgtttgaggtgcatagaaatcaaaaccattatcaagctcgacaaaattttcatgttcatatgttaacttttcaatatcaaactttccaagtatataaccactttgataaatatttttgaactgatcgccttttggttcaataccttgtggacaaataagtatgacatcttgattatctacattaaagtaatctgggcattcccacatatatccaaaatcatccaactctgtatttatttcacctaaataatgccaattaattatatcttcagtattataaagtaataatcgaccttgctgatcattattttgtgcaccaatgattgcataatatttctcatcatatttaaaaactttaggatctctaaaatgacttgtatatccttctggttgctggctaattactggctttggaaacttttcaactgaaccgtcttctttcagtcgtgcgatcatctgacttgcatgtcgttgccaatgattatctcgatgatttcctgtgtacatataatataaatgcccgttatattcaaaagcgctaccgctatatacaccatggctgtcatatctagtatctggatttaaaattggcccttcagctttaaagtttattaagtcatcactcgtgtagttataccaatactttaagccatgtactgcgcctaatgggaaccattgatgtgaaacataatacttccctttataaaaaataagtccgttggggtcatttaataagcctgtttctggttgtatatgaaattgttgacgaaattttgattgatcaacttgttgttttaatgttttaaaatactcagtatcaacgtcctcgattcgttgataacgttcttctctagtccattcggtcataatatttacccagtcctccttttataatttatgctgttaacaatttatattctattatagcaaattttacctacgttctttaacttttaacctatccatttatagttatatggtatcggttccacatttattttaaaaaatacagcgtctaaatattaacatctactgtgacgctatatggcatatcttgctttttaagcatctgttgtatctcttccatcgcgcattggccagcttcaaaataattataatgaattgtttttatcgatggagacactaattgtgtcattgggtcaccaccaaaaccatatatttgatgtggtttcataacatcttttttatcagaataatatttataggcagctaatgcaatcgtatcagttgctccaacaaccgcatctacttgctccacattttccaaaacatttgcaacatctttttgtgcttccacataagtaaaatttgtttcatgtatattaggtttaatttggtatttagctaactggtcaagtaaaccacgttttctatgtataccaactgcaatatctttttcacttacactaaacacttcaacttgttgatatccctgttgaccaatccattcgcctataatttgacctgctttataatcatcatgcacaatactatgaagttgttcatgttgttgaccaacaataacgattggtacattcattttattaatgacttcaatatgtctctctgttatgtctgtagccattaaaacaataccatctactttactgcgtgctaatgtttcaagcgcttgtatttctgcttcgatatttaaacctgtgtaatttaaaattaattgtgattcatatttttggcattgttttgccaatcctttgattgtttcatctactgcatatgaattcattctaggtataatggcaccaataaggtgtgtttgtctcgctcttaaactttgagcaaattgattcggttgatagtcatgttctgctataattcttgttaatttttcacttgtttttttactgacagatccattatttaaaaatctagatactgtactttttgaaacgcctgccaatttggcaatatcagatatatttttcatacttattcacctatcattatttgtgacacttagccttattttagcatatgtgtaaccgctttaaataatatttctgcttctttcataaaaagatttcaaaataaaacttttgtataacaaaatgtcccaacatcaacctttagttaaatgtcaggacaatgaatattctatgtaaatatattctaatatcgaatatgtttattgaatctatttagctcaccttcaaagtaagcatgttcaccgtgaacaatcttgtctaatcctatattcgtttcttgttccgtaacagataatggtgtaattaatttaattactttcgcaataataaacgtcatgactatactaaaaattacaactgctgttacacataatatttgtacaagtataatatgtatgtcaccagtataaataaagccattctcaatgtcaggattggctttttcactttggaaaactgctgttaaaacagcaccaataataccaccaacaccatgaataccaaatgcatctaatgcatcatgatattttagttttaccttgatgtaattaatgacaatataacaacagatacctcctattaaagccattattgttgcactaagatatgttacatatcctgctgcaggagtaatgacaactaatcctgctaatgcaccgagtaaaagtccaagtaaacttgtcgtctttttaaaaatatattctaaaattaaccaacctatagcacctgcactggctgaaatgacagtatttgtaaatgcaagcatcgcaatattatcaaatgtaaaagcactacctacattaaatccataccaaccaatccacacgaatataccgccaatcaacgtaatgataagattatgtggtgttgattcagaatgtttgtttccttttccaatcataatagctaatactaaaccagaaacacctgatgtaatatgaacaaccgtacctccagcgaaatctaatacaccgagtttgttaatccaaccgccgccccaaatccaatgtgctactggactgtatacaagagcagtccatattactacgaataataaataaggaataaacttcattttctcagcgattgaaccagataaaatagaaattgcaatcgtacaaaacatcatttgaaataacataaacaaagcgaaaggaatatgtgggctaatatcttcttgagtcgcaaaacctacatgattaagaaaagtatattcccaatttccgaaccataaattcccattcccaaaactaattgtaaaaccaactgttatccatacaaatgtaacaagcacaattgctgccatactttgcatgacagtattaagcgcatttttagattgaactaacccaccataaaataaacttaatcctggtgtcattaaccaaactaataatgtacacaaaaacataaatatcgtatcgttaagattcatacttaccactccctttttttcataataatctgacaatttataaaaagcaaaaatgcgttaagttttattacatcttttggaataaaatgtgccacactatataaaaatgatttcatgaactaaaacaaaaaagactacttactcacttttaaattagcggaagtagccatagaatctaatatctattttattgttaaaatgataacgttaaactttttgaattgtaattgtccatgaagcattatcaatttgttcatagtttgttacaggataaccattttctgcagcccaatttggaatggcttccgtcgcttgcgtgcaatcaaaatcaatttttaattcatctccagattgcaatgttgccattttcttttgcgcttcaattaacggaaatggacataccattcctactgtacctaattcgtgtatcataattatttctccttttccaatcacttttatttgatcaacatcatttgcataataatcttctatactatttgcgtttgctgtttaacctttgcagattgttggtgtacttttttcattggacgaacaaagataaaatgactcattgtccatacaccaactatcatcgatgctagcgcaatccatccttgccaagtcatcgttgccgtttcaaccaaaccgttaccgatagaacaaccaccagcaactgacgcaccaaatcccatacatatgccaccaatggcactgtttcgtattgtaatcttgtctggcaatcgccatttaaattctcttgatcctctagctgcaatatatgaaccaatgaaaattcctagaactaaaaagacaccccaatcaataaatttagtttcacctgtaatcaaaaagtgtactaaatttgctgaaggcgttgttatacctaaaccgtcatttcttccagttgatgcactcattggccaagctaagagtgcgataagtccaattacaattgctgcaataaatggatggtatcgtttttcgaaaaggtaatatctaatacctgtataacgttgctttagttttggaacagcaactcgaactttcttattattgagtgttcttacaactagaaaaatggtgattatagttaatataacgactaatccccaaaacggaatgccagttgtttgagacatatcactatttacattcgttggttgattaattttatccattactggctttaaaatccctgttttagtgattgctgcagtaacagcatataatactaatgcaatccaactaccaattagcccttcaccagcgcgataccaagtacctgttgcacatcctccagccaatactattccaattccaaaaataaaagaacctataattgttcccaatattggaaaactatgtgcaggaatttgtaaaatatctgttgccgtcaaaatcaataatcctatactttgaatagtaatagcgattaataatgcatagaacatcttattattcttttgcacatacatatctcgaaagccacctgttaaacaaaatcttgttctttgcatgacaaaacctaagagtcccccgacaattaagccactaaaaatcatccacataatcctaacctctcatttccgataagtttagtatgtattataggtgatgattttcttgttttcaaccttatacacaatatttttgatatttatattatattcatataaggaaggcgattaattacgattcatcattatatctctacgtgttaatttattaacctatactatatttatcaacacaacagtttttcctttcattttcaaacataacagaaaaagcctgagacatacttagtcccagactgttctataattaattaaagatataacaaggttaatcattcaaagctaacatcacatttattcactgtaatttttcataaagaataataatgactgtaattctatacctaagtcaatttgatgtacttgcacatctgaaggcgtattaattctaccaggagtgaagtttaaaatacctttcacaccagcttggacgagttcatctgcaactttctgtgcaactctttctggtgtagttagaatcacaacatctatttcttccttcttcaatgttgttattaattcatcgttatctttaacaataacgttccctattttctggccaataacatcttcttttacgtcaaacgcttctgtaatcgtcatatcgtcatgtattgaaaagttatatgtgagcaaagctttccctaggttcccaactccgacaattgcgattttgatcatgtcactctcgcttagttcagatttaaagaaatccaataaactatctatattatatccgtacccttttttacctaattcgccaaaatatgaaaagtcacgacgaattgttgccgagtcaatttgtaacgcatcgctaatcgcttttgaatttacacgatctatacctttagattttaatgaactgacaaatctataatataacggcaaacgttttaaagttgctcgaggaattttaacttggtcactcattcgctatttcctccttcgtgtttgaatgaattatatctatgtattcaaacgagttagagcgtaattgttagattattaaaaaacaaataattgattacaatgaatacctaaatattatacattattgaattttaaaaataaatatcttagtttcaagacggcgttttatactgtaaaatggttattaatgtaataattacgacttttttcataagttaataaaatttgagaaagacgaaaggtgaagatcgaatgatacttttacaactcaatcatatatcaaaatcgttcgatggtgaagatatatttactgatgttgattttgaagtaaaaactggtgaacgaattggtatcgtaggaagaaatggcgccggtaaatcaacattgatgaaaattatagctggcgtagaaaactatgattctggaaatgtgtcaaaaattaaaaacttaaaactaggttatttaactcaacaaatgactttaaattctaatgcaacagtttttgaagaaatgtcaaaaccatttgaacatattaaacgaatggaaagcttaatcaaagaagaaacagattggttatcaaaacatgcaaatgattacgatagtgatacatataaaacacatatgtcccgttatgaatctttatcgaatcaatttgaacaattagaagggtatcaatatgaaagtaaaattaaaacagtacttcacgggttaaattttagtgaagaagatttcaataaacctatcaatgattttagcggtggccaaaaaacacgtttatctttagctcaaatgctattaaacgaacctgatttattacttttagatgaacctactaaccacttagatttagaaacgacaaagtggcttgaagattatctacgttattttaaaggtgcaatcgtcatcatcagccatgatcgttactttttagataaaatagttactcaaatttatgatgtggctttaggtgatgtcaaacgctatgttggtaattacgaggaatttatacagcaacgggatttatattatcaaaaacgaatgcaagaatatgaaagtcaacaagcagaaataaaacgattagaaacttttgttgagaaaaatattacccgtgcttcaacaagtggaatggcaaaaagtagacgtaagattttagaaaaaatggaacgcattgataaaccaatgttagatgccaaaagtgcaaatattcaatttggctttgaccggaatacaggtaatgacgtcatgcatgtaaaaaatttagaaatcggttatcaaactgcaattaccaaacctatcagtatagaggtctctaaaggcgatcatatagcaatcattgggccaaatggtattggaaaatcgaccttaattaaaactattgctaatcaacaaaaagcgcttaatggcgatattactttcggcgcaaatttacaaattggttattatgatcaaaagcaagcagaatttaaatctagtaaaacgattttagattatgtgtgggatcaatatccgttaatgaatgaaaaagatattcgtgcagttcttggtcgtttcttatttgtacaagacgatgttaaaaagataattaatgatttatctggtggtgaaaaagcacgtttacaactagcactacttatgttgcaacgtgacaatgtacttattttagatgaacctaccaaccacctcgatatagattcaaaagaaatgttagagcaagcactccaacattttgaaggaacaatactatttgtttcccatgatcgttactttattaaccaattagcaaacaaggtatttgatttaacaattgatggcggaaagatgtatttaggagattatcaatattacattgaaaaagttgaggaagcggaagcgttgaaagcgcaccaagaagaacagtcagttaacgtacaagcacatgaaaagtctatggaacaatcgtcgtatcataaccaaaaagaacaaagacgtgaacaacgcaaacttgaacgacaaatatccgagtgtgaaaatgaaatagaaactttagagactactatcttacaaatagacgagcaattaacgcaaccagaagtgtataacaatccacaaaaagcaaacgaattagctatccaaaaacaagatagcgaacaaaaattagaacacgctatgtctaaatgggaagaattacaacaaaaactataaaaatatacataactctaactgtaaaatcgctatagttagagttatttttttacaaattttaatttttttattcacaataaaaacgctgatattaaagctatccacagacttatcctagttatccacaagtaaattaacactaatcaattatttattttctgttttcccacctgatatccacaataaataacgttcccaacaccttttatccacaagttattcactctttgttgataagtacgcatgttctctattgacattgtttttatcaaaattcattgttaagacactttctttatgaaataagactgggacataaatccctaaaaaacagcagtaagataattttcaattagaaaatatcttactgctgttctctatttatacaatacttcgtattgaatggcttcgctatgcccatctggcacattactgtaaaattctataaatagaatttttgatgatgggtcccttcctagggtgccgtctcagcctcggtcttcgactggcactgctccctcaggagtctcgccattaatactacgtattaacatgtaattttactttgaaatactttaaaaaaataagacactttgcccaacttgcacataaatgtaaaattcaataaaatgaattttctgtgttgggtcccttcgtataatttaataaataccactaaactaaattaacgaggtgccttatgtataaaaattataacatgacccaacttacactaccaatagaaacttctgttagaattccttaaaatgatatttcgcgatatgtaaatgaaattgttgaaacgatacctgatagcgaattcgatgaattcagacatcatcgtggcgcaacatcctatcatccaaaaatgatgttaaaaatcatcttatatgcatatactcaatctgtattttctggtcgtagaatagagaaattacttcatgacagtattcgaatgatgtggttagctcaagatcaaacacattattaaaaataaataaggggatacttatgagcacaaatcaaacatttttaatatttgttatagcaattattatacttacatcggtaataggaattgttggacgatacatgagtcgtcaacgtctattaaaatctatggaaacattatggcaaacgatttctccattagaggcttttatcagaccgaactcacatttcgactatgagtataagctctacaaggaaaaatttgaatcacattcactagttgatgataaaacttggtccgacttaaatatgaatgcaatctttcataagatgaattataatttaacagctattggtgaaatgaagctatatgcctgtttacgtggaatgctttcaattacgaacaaatcattacttagtttatttaatgataatgctgaatttagaaaaaacgtaacatatcatttagctttgattggtaaagctgtttatccaacatttccagaccaaatcacaccggtaaaacgtcaaaatatattgtttctatgcccgtttttaccagttatctcatttgcagttatatttattaattcacaagttggtattttattatttcttatgagttgcctatttaatatcattttatcagcaactttaaagcgtacatatgaggatgacttaaaatctatcttttatgcatccaatgttttaaaacaaggctatactatctcaaaaattaaacatgttccacaacctgaagtcaattttaagcaatttagaacagcacgtcatttaacgagtgttttagctgaagttaatgatgaagatatcggagctatggtaattaaactagttaaacttattttcatgattgattatgttttatttcattcaattcaaaaaagctatacaacacatatgaatgagcttaaaaattgtttcgattacatagctgaattagataatcattatgcattagcaatgtatcgtagaacgctagaatgttatactgaaccacaaattgatgattcaaatgatggcatagtattctctgagttaacacatccactcatagcagatgcagtagccaatgatttctcactatcacaaaatatactgttaactgggtctaatgcttcgggtaaatcaacatttatgaaatccatagcaataaacattattcttgcatcggctatacaaacagttaccgcaagcaaatttgtatatcaacctggaattgtgttcacgtcaatggcaaatgccgatgatgtgttatcaggcgatagttattttatggctgaattaaaatctattaagcgtattgttgaaattccagataatcaaaaaatatactgctttatagatgaaatttttaaaggtaccaacacaactgaacgaattgccgcttcagaatcagtactatcatttttacatgaaaaatctaactttagagttattgcagcaacacatgatattgagttagctgaactcttaaaacaacgttatgaaaattatcatttcaatgaggtaatagaaaataataacatacattttgattacaaaattaagcctggcaaagcaaatactcgtaatgccatcgaattattaaaaatcacttcatttccagcaaaaatatatgaacgagcaaaagataatgtcccgaaaatttagcatttaactttaaatataaaaacgtcagctatcacatgacagaagactatgaacagtttcaataatgttcatcgtaatcatgttaataactgacgtttattttattctgcagaatactcttctaaatctatattgctgtgcccatttaatgctaaatcagcaaatcgaccttgctgatacaaatagtggccggcaacgcctatcattgcagcattatctgtgcataatttaggacttgggatagttaattgaatgtcattgactttgcattgatccgctaaagattgacgtaatcctttattactcgccacgccaccagcaacaattaatcgctgaacaccatattctttacaagcttgaatagctttaaacgtaagcacctctacaacactattttgaaagctcgttgctacgttagcttcaatgattggaatatttttttgtcgttgattgtgaagttgattgattacggcacttttcaacccactaaaactaaaatcataactatctttatccaaccaaacacgagggaatgaataagtatcttcaccttcagcagccaaccgatcaacttgtggaccacctggataatttaaaccaattgttcgtgccactttatcataagcctcacctactgcgtcatctcgtgtttcaccaatgacttcaaatgataaatgatccttcatataaactaattcagtatgtccacctgaaacaataagtgcaattagcgggaatgttaatggctcttctatgtgattagcatatatatgtcctgcaatatgatgaacaggaataagtggcttatcgtaagcaaatgccaatgctttggctgcattaacacctattagtaacgcaccaattagtccagggccttctgtaaccgctatggcatcaatatcttctattgatacatcggcatccactagagcctcgtttattgttgttgttataccttcaacgtgatgtctacttgccacttcgggaacgacaccgccaaatcgtttatgactttcaatctgacttaaaactgtatttgataaaatctctctgccattttttagaacactaacgcttgtttcatcacaacttgtttcaacagctagtattaatatatctttagtcatttaaattcacccacataaccattgcgtcctcaccttcaccataatagtttttacgtttaccaccatattgaaatcctaaattttcatatacatgttgtgccactttattattaactcttacttctaaactcatcacatcacaagtgtgacttgcatagtttattccgtattttaaaagcatttgacctaaaccatagcctctataattatcatcgattgcaactgttgtaatttgagcttgatcgataacaatccataaacctaaataaccaataatttgttgttcaaattctaagacaaaatatttcgcaaagttattttgctctatttcatgataaaatgcgtcaattgtccaagaactgtcattgaaactccgacgctcaagatcaaagacttgtggcacatcttctttagtcatctctctaatgtttaattgttcttttgactgttgatccaatttcgttccgcctcagctaatttatggtatttaggagtaaatgtatgtacgtctgtaggtttatctatcaattgatacatgactgatgcatttggtagctgcgcaatcacttcaccttgtaattcatcttgtaattttacagtatctttcccaatataaataaatggttggtttaaatcttctaaaaaagctcgcaatgcctctatcgacatatattgatcttctaaaatagtcactaattgaccattttgccactggaatatgcctgtataaactgcttgtcgtcttgcatcaaacacaggaaccaataattcatcagtatgatcgattgttgctgccaatgcctttaatgatgaaacaccatataatttaacatctaacgcatacgctaatgttttagcaacagtaacaccgatacgtaagccagtatatgaaccaggaccttcagcaacaataatcgcatctaattgctgtttagctattttgctctgctcaaatagctgactaatcgcaggcattaattgcactgaatgattttgtttagaatccgtagttatttcagctaaaacttcatcgttttgcatcaatgctactgataatggttgattcgatgtatcaatgagcagcaaattcatggataattgcctccttaatttgttcataatgttctccttgcgcgaacaactcaatttgtcttgtattttcagatattgttgaaatgttaatagataaatgcgtcgctggaagtaaatcttttataaattgactccattcaataacagtaattgcctgatcttcgaaaaattcatcaaatcctaaatcttcatcagaatcttctaagcgataacaatccatatgatgcaattttaaatttttacccctatatgatttaatgatgttaaatgtcggggaattaatcgtacgtcttacaccaagagcttttcctataaattgcgttaacgttgttttacctgctcctaaatctccgttaagtaaaatcaaatcaccacttttcaattgctcaactaaaaatatagcaaattgattcatttcatctaaattatttatctttatcaatgttgattctcctatattatgcttttcattcataaaaatgattatccattattcaatcgtatctaactttatatttaacctttatattgtaacaaatttcaacttaaatttcttatctttgaaacagattatctattcaaagttaattgtaagaaaatttaaaatatttgttgacatactaaagcagatatagtaaattaaatttatcaaatttttagacaattctaactattaaagtgatatataccattcacggaaggagtataataaaatgcttaatcaatatactgaacatcaaccgacaacttcaaatattattattttattatactctttaggactcgaacgttagtaaatatttactaaacgctttaagtcctatttctgtttgaatgggacttgtaaacgtcccaataatattgggacgtttttttatgttttatctttcaattacttatttttattactataaaacatgattaatcattaaaatttacgggggaatttactatgcgaagcgacatgatcaaaaaaggagatcaccaagcaccagcaagaagtcttttacatgccacgggcgcgctaaaaaatccaactgatatgaacaaaccatttgtagctatttgtaactcttatattgatattgttcctggacatgttcatttaagagagcttgcagatatagctaaagaagcaattagagaagccggtgccattccatttgaatttaatacaattggtgttgatgatggaatagctatgggacatatcggaatgcgatattctctaccatcacgtgaaattattgcagatgcagctgaaactgtaattaacgctcattggtttgacggcgtattttacattcctaattgtgacaagattacacccggtatgattttagcagccatgaggacaaacgtaccagctatcttttgctctggtggaccaatgaaagctggcttatctgcacatggaaaagcattaacactttcatcaatgtttgaagcagtcggcgcatttaaagaaggatcgatttctaaagaagaatttttagatatggaacaaaatgcctgccctacttgtggttcatgtgctgggatgtttactgcaaattcaatgaactgtttgatggaagttttaggtctagcattaccatacaacggtactgcacttgcagtcagtgatcagcgacgagaaatgattcgccaagcagcttttaaattagttgaaaatattaaaaatgatttaaaaccacgtgatatcgttactcgcgaagcaattgatgatgcatttgcacttgatatggctatgggtggttcaacaaacacggtactgcatacgttagccattgccaatgaagctggtattgattatgacttagagcgcattaatgctattgccaaacgcacgccatatttatcaaaaatagcacctagttcatcgtattcaatgcatgatgtgcatgaagctggtggcgtcccagcaattattaatgaattgatgaagaaagatggcacgttacacccagatagaatcacagttactggcaaaacgttacgtgaaaataacgaaggcaaagaaattaagaactttgatgtcattcaccctcttgatgcaccatatgatgcacaaggcggtttatctatcttatttggtaatatcgcccctaaaggcgcagttattaaagttggcggcgttgatccatctatcaaaacatttactgggaaagcaatttgtttcaattcgcatgatgaagctgttgaagcaatagacaatcgtaccgttcgtgcaggccacgtcgttgtcattagatatgaaggacctaaaggtggaccaggtatgcctgaaatgttagcacctacttcctctattgttggtcgcggcttaggtaaagatgttgcattaattactgatgggcgtttttccggtgccacaagaggtattgcagttggtcatatttcccctgaagctgcatctggtggaccaattgccttaattgaagatggtgatgagattactattgatttaacaaatcgtacattaaacgtaaaccagcctgaagatgttctagcgcgtcgccgagaatctttaacaccatttaaagcgaaagtaaaaacaggttatctagctcgttatactgccctagtaactagcgcaaatacaggtggcgtcatgcaagtccctgagaatttaatttaatttatttttatattggagatggttaaaatgtctaaaactcaacatgaagtaaaccaaaatattgaccctttaaaaatggctgaatcacttgaacctgaacaactaaatgaaaaaactttaaatgatatgcgttcaggatcagaagtgctagtagaagctctacttaaagaaaatgtggattatttattcggttatcctggtggtgccgtactacctttatatgacacgttttatgatggtaaaatcaaacatattttagcaagacacgaacaaggtgctgttcatgctgcagaaggttatgcacgtgtatctggtaaaactggcgtcgttgtagttacaagcggtccaggtgcaactaatgtaatgacaggtattacggatgcacattgcgactctttacctctagttgtattcactggacaagttgctacaccaggcattggtaaagatgcattccaagaagcggatattctatctatgacttcaccaattacaaaacaaaattatcaagtgaaacgtgttgaagatatccctaaaatcgtacacgaagctttccatgtagctaattctggacgcaaaggtcctgtagtgattgattttccaaaagatatgggtgttttagctacaaatgtggatttatgcgacgaaatcaatattccaggttatgaagttgttacagaaccagaaaataaagacattgacactttcatctcacttttaaaagaagcgaaaaagcctgtcgtattagccggcgcaggtattaatcaatcaaaatcaaatcaattattaacacagtttgttaataaacatcaaatcccaacagttactactttactaggtctaggtgctgtaccttatgaggatacactatttttaggtatgggaggtatgcatggttcttatgctagtaacatggcattaactgagtgtgatttactcattaatttaggtagccgcttcgatgatagattagcaagcaaacctgatgcctttgcacctaacgccaaaattgtacatgtagatattgatccttcagaaatcaataaagttattcatgtagatttaggtattattgcagactgtaaaagatttttagaatgtttaaatgataaaaatgttgagactatagaacacagtgactgggttaaacattgtcaaaataataagcagaaacacccatttaaacttggtgaagaagatcaagtattttgtaagccacaacaaacaatcgaatatatcggcaaaattacaaatggtgaagcaattgttactacagacgtgggacaacatcaaatgtgggcagctcaattttatccatttaaaaatcacggacaatgggttacaagcggtggtttaggaacaatgggattcggtattccttcgtcaattggtgccaaattagctaatcctgataaaacagtcgtatgtttcgtcggtgacggtggtttccaaatgacaaaccaagaaatggcacttttacccgaatatggtttagatgtcaaaatcgtactaatcaataatggaacattaggtatggttaaacaatggcaagataagttctttaatcaacgcttctcacactcagtatttaatggtcaacctgattttatgaaaatggcagaagcatatggcgtcaaaggtttcttaatcgataagccagaacaactggaagaacaattagatgcagcgtttgcttatcaaggaccagttttaattgaggttcgtatttcccctactgaagctgtaaccccaatggttccgagtggcaaatcaaatcatgaaatggagggcttataatgacaagaattcttaaattacaagttgcggatcaagtcagcacgctaaatcgaattacaagtgcttttgttcgcctacaatataatatcgatacattacatgttacacattctgaacaacctgggatttctaacatggaaattcaagtcgatattcaagatgatacatcacttcatatattaattaaaaaattgaagcaacaaattaatgttttaacggttgaatgctacgaccttgttgataacgaagcttaattttaagacaaaggcaatgatgcgctaattagttatagatatatcataggctgctagttaacatctgccactattacaaagttatatttcagaattttcgaaaaacaaaatatttaattatttggaggaatttattatgacaacagtttattatgatcaagatgtaaaaacggacgctttacaaggcaaaaaaattgcagtagtaggttatggatcacaaggccacgcgcatgcacaaaacttaaaagacaatggatatgatgtagtcatcggtattcgcccaggtcgttcttttgacaaagctaaagaagatggatttgatgtgttccctgttgcagaagcagttaagcaagctgatgtaattatggtgctattacctgatgaaattcaaggtgatgtatacaaaaacgaaattgaaccaaatttagaaaaacataatgcgcttgcatttgctcatggctttaacattcattttggtgttattcaaccaccagctgatgttgatgtatttttagtagctcctaaaggaccgggtcatttagttagacgtacatttgttgaaggttctgctgtaccatcactatttggtattcaacaagacgcttcaggtcaagcacgtaatattgctttaagttatgcaaaaggtattggtgcaactcgtgcaggtgttattgaaacaacatttaaagaagaaactgagacagatttatttggtgaacaagcagtactttgcggtggtgtatcgaaattaattcaaagtggctttgaaacattagtagaagcgggttatcaaccagaattagcttattttgaagtattacatgaaatgaaattaatcgttgatttgatgtatgaaggcggtatggaaaatgtacgttactcaatttcaaatactgctgaatttggtgactatgtttcaggaccacgtgttatcacaccagatgttaaagaaaatatgaaagctgtattaactgatatccaaaatggtaacttcagtaatcgctttatcgaagacaataaaaatggattcaaagaattttataaattacgcgaagaacaacatggtcatcaaattgaaaaagttggtcgtgaattacgcgaaatgatgccttttattaaatctaaaagcattgaaaaataagatagacctacaatgaggagttgttaaatatgagtagtcatattcaaatttttgatacgacactaagagacggtgaacaaacaccaggagtgaattttacttttgatgaacgcttgcgtattgcattgcaattagaaaaatggggtgtagatgttattgaagctggatttcctgcttcaagtacaggtagctttaaatctgttcaagcaattgcacaaacattaacaacaacggctgtatgtggtttagctagatgtaaaaaatctgacatcgatgctgtatatgaagcaacaaaagatgcagcgaagccggtcgtgcatgtttttatagcaacatcacctattcatcttgaacataaacttaaaatgtctcaagaagacgttttagcatctattaaagaacatgtcacatacgcgaaacaattatttgacgttgttcaattttcacctgaagatgcaacgcgtactgaattaccattcttagtgaaatgtgtacaaactgccgttgacgctggagctacagttattaatattcctgatacagtcggctacagttaccatgatgaatatgcacatattttcaaaaccttaacagaatctgtaacatcttcaaatgaaattatttatagtgctcattgccatgacgatttaggaatggctgtttcaaatagtttagctgcaattgaaggcggtgcgagacgaattgaaggcactgtaaatggtattggtgaacgagcaggtaatgcagcacttgaagaagtcgcgcttgcactatacgttcgaaatgatcattatggtgctcaaactgctcttaatctcgaagaaactaaaaaaacatcggatttaatttcaagatatgcaggtattcgagtgcctagaaataaagcaattgttggccaaaatgcatttagtcatgaatcaggtattcaccaagatggcgtattaaaacatcgtgaaacatatgaaattatgacacctcaacttgttggtgtaagcacgactgaacttccattaggaaaattatctggtaaacacgccttctcagagaagttaaaagcattaggttatgacattgataaagaagcgcaaatagatttatttaaacaattcaagaccattgcggacaaaaagaaatctgtttcagatagagatattcatgcgattattcaaggttctgagcatgagcatcaagcactttataaattggaaacactacaactacaatatgtctctagcggccttcaaagtgctgttgttgttgttaaagataaagagggtcatatttaccaggattcaagtattggtactggttcaatcgtagcaatttacaatgcagttgatcgtattttccagaaagaaacagaattaattgattatcgtattaattctgtcactgaaggtactgatgcccaagcagaagtacatgtaaatttattgattgaaggtaagactgtcaatggctttggtattgatcatgatattttacaagcctcttgtaaagcatacgtagaagcacatgctaaatttgcagctgaaaatgttgagaaggtaggtaattaattatgacttataacattgttgccctacctggtgatggaatcggtccagaaattttgaacggatctctatcattgcttgaaattataagtaataaatataactttaattatcaaatagagcaccacgaatttggtggtgcctctattgatacattcggcgagcctttaactgagaaaaccttaaatgcgtgtaaaagagcagatgctattttactgggtgcaatcggtggacctaaatggacagatcctaacaatcgaccagaacaaggattattaaaattgcgtaaatccttaaatttatttgcaaatatacgccccactaccgttgtcaaaggcgctagttctttatcacctttaaaggaagaacgcgttgaaggcacagatttagttattgtccgtgaattgacaagtggtatttattttggagaacctagacattttaataatcacgaggccttagattctcttacttatacaagagaagaaatagaacgcattgttcacgtagcatttaaattggccgcttcaagacgaggaaaactaacatcagttgataaagaaaatgtattagcttctagtaaattgtggcgcaaagtcgtaaatgaagtaagtcaattatatccagaagtaacagtaaatcacttacttgttgatgcttgtagtatgtatttaatcacaaatccaaaacaatttgacgtcatcgtatgtgaaaacttatttggcgatattttaagtgatgaagcttcagtgattcctggttcacttggtttatcaccttctgctagttttagtaacgatggtccaagattgtatgagcctattcatggatcagcaccagatattgcaggtaaaaacgttgccaatccatttggaatgattctatctttagcgatgtgtttacgtgaaagcttaaatcaaccagatgctgcagatgaattagaacaacatatttataacatgattgaacatgggcaaacgacagcagatttaggcggcaaattgaatactactgatattttcgaaattctatctcaaaaattgaatcactaagggggagatgtaaatgggtcaaacattatttgacaaggtgtggaacagacatgtgttattcgggaaattgggcgaaccgcaactattatacattgatttacaccttatacatgaagttacttctcctcaagcatttgaaggacttaggcttcaaaacagaaaattaagacgcccagatttaacatttgcaacactcgatcacaatgttcctactattgatattttcaatattaaagatgaaattgcaaacaaacaaatcacaacattacaaaaaaacgccatagattttggggtgcatatttttgatatgggctctgatgaacaaggtattgttcacatggtaggacctgagacaggacttacacagcccggcaaaacaatcgtttgtggtgactctcacacagcaacacatggagcatttggtgctattgcatttggaattggaacaagtgaagttgaacatgttttcgcaactcaaacgctatggcaaacaaaacccaaaaacttaaaaatcgatattaatggtaccttaccaacaggcgtctatgctaaggacattattctgcatttaattaaaacgtatggtgttgattttggtacaggctatgctttggaatttactggcgaaacaattaaaaacctttcaatggacggtcgaatgactatttgtaacatggctatcgaaggtggtgccaaatacggcataatccaacctgatgatataacatttgaatatgttaaagggagaccatttgccgataacttcgctaaatcagttgataagtggcgtgagctatattctgatgacgacgcgatatttgatcgtgtaattgaacttgatgtttcaacattagaaccacaagtgacatggggaactaatcctgaaatgggtgttaatttcagtgaaccattccctgaaatcaatgatatcaacgatcaacgtgcgtatgattatatggggttagaaccaggtcaaaaagctgaagacatcgacttagggtatgtttttctcggttcatgtacaaatgctagactatcagatttgattgaagctagtcatattgttaaaggaaataaagttcatccaaatattacagctattgtcgtaccaggttctcgtacagtaaaaaaagaagcagaaaaattaggtctagatactatctttaaaaatgcaggatttgaatggcgtgaaccaggatgttcaatgtgtttaggcatgaatcctgaccaagtacctgagggcgtacattgtgcatctacaagtaatcgaaactttgaaggacgacaaggcaaaggtgcaagaacacatttagtatcccctgctatggcagcagcagcagctattcatggtaaatttgtggacgtaagaaaggtggttgtttaaatggcagcaatcaaacctattacaacatataaaggtaaaatagtccctctcttcaacgacaatatcgatacagaccaaatcattcctaaggtacacttaaagcgtatttcaaaaagtggctttggtccatttgcttttgatgaatggcggtacttacctgatggttcagataatccagatttcaatcctaacaaaccacaatataaaggggcttctattttaattacaggagataattttggatgcggttcaagtcgtgaacatgctgcttgggctcttaaggactatggttttcatattattattgcaggaagtttcagtgacatattttatatgaattgcactaaaaatgcaatgttgcctatcgttttagaaaaaggtgcccgtgaacatcttgcacaatatgaggaaattgaaatagatttaccaaatcaaactgtgtcatcaccagacaagcgtttccattttgaaattgatgaaacatggaaaaataaattagtaaatggattagatgacattgcaatcaccctacaatatgaatcattaatagaaaaatatgaaaaatcactttaagggagttgaatattatgacagtcaaaacaacagtttctacgaaagatatcgatgaggcatttttaagacttaaagatattgtcaaagaaacacctttacaattagaccattacttatctcaaaagtatgattgtaaagtctatttaaaacgagaagatttacaatgggtacgttcttttaaattaagaggtgcttacaacgctatttctgttttatcagatgaagctaaaagtaaaggtattacatgtgcaagtgcaggtaatcatgctcaaggtgttgcctatacagctaaaaaacttaatttaaacgctgttatctttatgccagtcactacacctttacaaaaggtaaatcaagtaaagttctttggaaatagtaacgttgaagttgtactcactggtgatacatttgatcactgtttagctgaagctttaacttatacaagtgaacatcaaatgaactttatagatccattcaataatgttcatacaatttctggacaaggtacgcttgctaaagaaatgctagaacaatcaaagactgacaatgttaactttgattatttatttgccgctattggtggtggtggattaatttcaggtattagtacttactttaaaacctattcacctactacgaaaattataggtgttgaaccttcaggtgcaagtagtatgtatgaatctgttgtcgtaaataatcaggtagtcacattgcctaatatcgataaatttgtggacggtgcatctgtagctagagttggcgatattacatttgaaattgcaaaagaaaatgtagatgattacgttcaagtagatgaaggtgcagtttgttctacgattttagatatgtattcaaaacaagcaattgtagcagaacctgctggcgcattaagtgtaagtgcgcttgaaaactataaagatcatattaaaggtaaaacagtggtttgtgtcattagtggtggtaataatgatattaatcgaatgaaagaaattgaagaacgttcattactatacgaagaaatgaagcattactttatcttaaatttccctcaacgtccaggtgcattgagagaatttgtaaatgacgtattaggacctcaagacgatattactaaatttgaatacttaaaaaaatcttctcaaaatacaggtactgtcattattggtattcaacttaaagatcatgatgatttaatacaactcaaacaacgtgtaaatcatttcgatccttccaatatttatattaatgaaaataagatgttatattcattgttaatttaacacatagtaagaaaaacagtcataaattgatttctaattgaaatcatcttatgactgctttttattatactttacatttctcgtttcgtcagattcaaacgttttcacttcgccaagccatttttctttgtgttaacttttattttgacgttttagacataaaaaaagagaccttgcggtctcaacttgcctggcaacgttctactctagcggaacgtaagttggctaccatcgtcgctaaagacctttcttgacttgtgacaattgcttgcttctttcctctttttcggctctcacttactcatttagctctactaaactcgttgcgctcttttctcgtttcgtcagattcaaacgttttcacttcgccaagccatttttctttgtatttgctttttattttgacgttttagacataaaaaaagagaccttgcggtctcaatgcagctcatcgcatccactttttgcctggcaacgttctactctagcggaacgtaagttcgactaccatcgacgctaaggagcttaacttctgtgttcggcatgggaacaggtgtgacctccttgctatagtcaccagacatatgaatgtaatttatacattcaaaactagatagtaagtaaaagtgattttgcttcgcaaaacatttattttgattaagtcttcgatcgattagtattcgtcagctccacatgtcaccatgcttccacctcgaacctattaacctcatcatctttgagggatcttataaccgaagttgggaaatctcatcttgaggggggcttcatgcttagatgctttcagcacttatcccgtccacacatagctacccagctatgccgttggcacgacaactggtacaccagaggtatgtccatcccggtcctctcgtactaaggacagctcctctcaaatttcctacgcccacgacggatagggaccgaactgtctcacgacgttctgaacccagctcgcgtaccgctttaatgggcgaacagcccaacccttgggaccgactacagccccaggatgcgatgagccgacatcgaggtgccaaacctccccgtcgatgtgaactcttgggggagataagcctgttatccccggggtagcttttatccgttgagcgatggcccttccatgcggaaccaccggatcactaagtccgtctttcgaccctgctcgacttgtaggtctcgcagtcaagctcccttatgcctttacactctatgaatgatttccaaccattctgagggaacctttgagcgcctccgttaccttttaggaggcgaccgccccagtcaaactgcccgcctgacactgtctcccaccacgataagtggtgcgggttagaaagccaacacagctagggtagtatcccaccagcgcctccacgtaagctagcgctcacgtttcaaaggctcctacctatcctgtacaagctgtgccgaatttcaatatcaggctacagtaaagctccacggggtctttccgtcctgtcgcgggtaacctgcatcttcacaggtactatgatttcaccgagtctctcgttgagacagtgcccaaatcgttacgcctttcgtgcgggtcggaacttacccgacaaggaatttcgctaccttaggaccgttatagttacggccgccgtttactggggcttcgattcgtagcttcgcagaagctaaccactcctcttaaccttccagcaccgggcaggcgtcagcccctatacatcaccttacggtttagcagagacctgtgtttttgataaacagtcgcttgggcctattcactgcggctcttctgggcgttaaccctaaagagcaccccttctcccgaagttacggggtcattttgccgagttccttaacgagagttcgctcgctcaccttagaattctcatcttgactacctgtgtcggtttgcggtacgggcacctattttctatctagaggcttttctcggcagtgtgaaatcaacgactcgaagacacaatgtcttctccccatcacagctcagccttaacgagtaccggatttgcctaatactcagccttactgcttagacgtgcaatccaatcgcacgcttcgcctatcctactgcgtccccccatcgattaaaacgattataggtggtacaggaatatcaacctgttatccatcgcctacgcctgtcggcctcagcttaggacccgactaacccagagcggacgagccttcctctggaaaccttagtcaatcggtggacgggattctcacccgtctttcgctactcacaccggcattctcacttctaagcgctccacatgtccttacgatcatgcttcaacgcccttagaacgctctcctaccattgtccaaaggacaatccacagcttcggtaatatgtttagccccggtacattttcggcgcagtgtcactcgactagtgagctattacgcactctttaaatgatggctgcttctaagccaacatcctagttgtctgggcaacgccacatccttttccacttaacatatattttgggaccttagctggtggtctgggctgtttccctttcgaacacggaccttatcacccatgttctgactcccaagttaaattaattggcattcggagtttgtctgaattcggtaacccgagaggggcccctcgtccaaacagtgctctacctccaataatcatcacttgaggctagccctaaagctatttcggagagaaccagctatctccaggttcgattggaatttctccgctaccctcagttcatccgctcacttttcaacgtaagtcggttcggtcctccattcagtgttacctgaacttcaacctgaccaagggtagatcacctggtttcgggtctacgaccaaatactaaacgccctattcagactcgctttcgctacggctccacatttactgcttaaccttgcatcaaatcgtaactcgccggttcattctacaaaaggcacgccatcacccattaacgggctctgactacttgtaagcacacggtttcaggttctatttcactccccttccggggtgcttttcacctttccctcacggtactggttcactatcggtcactagagagtatttagccttaggagatggtcctcccagattccgacggaatttcacgtgctccgtcgtactcaggatccactcaagagagacaacattttcgactacaggattattaccttctttgattcatctttccagatgattcgtctaatgtcgtcctttgtaactccgtatagagtgtcctacaaccccaacaagcaagcttgttggtttgggctcttcccgtttcgctcgccgctactaagggaatcgaattttctttctcttcctccgggtactaagatgtttcagttctccgggtgtgccttctgatatgctatgtattcacatatcgataacatgacataactcatgctgggtttccccattcggaaatctctggatcaaagcttacttacagctccccaaagcatatcgtcgttagtaacgtccttcatcggcttctagtgccaaggcatccaccgtgcgcccttaataacttaatctatgtttccaccatttttataagtcaaacgctcacatactgtttcgttttcattatttaaaatgctcatttacagaagtaaactccgctttcaaataattcaactcattgtctgctaaacgttttcttttataaaaagatttaaacgcgttattaatcttgtgagtgttctttcgaacactagcgattatttcttatgaattcaagcttatttaaaactctttattcactcggttttgcttggtaaaatctatatttacttacttatctagttttcaatgtacaatttctttttagtcaagcgctcgcatactgctttattttcaaaagcaatatcactttaaccaaaaaatatttgaatgttaaataaacattcaaaactgaatacaatatgtcacgttattccgcatcttctgaagaagatgttccgaatatatccttagaaaggaggtgatccagccgcaccttccgatacggctaccttgttacgacttcaccccaatcatttgtcccaccttcgacggctagctcctaaaaggttactccaccggcttcgggtgttacaaactctcgtggtgtgacgggcggtgtgtacaagacccgggaacgtattcaccgtagcatgctgatctacgattactagcgattccagcttcatgtagtcgagttgcagactacaatccgaactgagaacaactttatgggatttgcttgacctcgcggtttcgctgccctttgtattgtccattgtagcacgtgtgtagcccaaatcataaggggcatgatgatttgacgtcatccccaccttcctccggtttgtcaccggcagtcaacttagagtgcccaacttaatgatggcaactaagcttaagggttgcgctcgttgcgggacttaacccaacatctcacgacacgagctgacgacaaccatgcaccacctgtcactttgtcccccgaaggggaaagctctatctctagagttgtcaaaggatgtcaagatttggtaaggttcttcgcgttgcttcgaattaaaccacatgctccaccgcttgtgcgggtccccgtcaattcctttgagtttcaaccttgcggtcgtactccccaggcggagtgcttaatgcgttagctgcagcactaaggggcggaaaccccctaacacttagcactcatcgtttacggcgtggactaccagggtatctaatcctgtttgatccccacgctttcgcacatcagcgtcagttacagaccagaaagtcgccttcgccactggtgttcctccatatctctgcgcatttcaccgctacacatggaattccactttcctcttctgcactcaagttttccagtttccaatgaccctccacggttgagccgtgggctttcacatcagacttaaaaaaccgcctacgcgcgctttacgcccaataattccggataacgcttgccacctacgtattaccgcggctgctggcacgtagttagccgtggctttctgattaggtaccgtcaagatgtgcacagttacttacacatatgttcttccctaataacagagttttacgatccgaagaccttcatcactcacgcggcgttgctccgtcaggctttcgcccattgcggaagattccctactgctgcctcccgtaggagtctggaccgtgtctcagttccagtgtggccgatcaccctctcaggtcggctatgcatcgttgccttggtaagccgttaccttaccaactagctaatgcagcgcggatccatctataagtgacagcaagaccgtctttcacttttgaaccatgcggttcaaaatattatccggtattagctccggtttcccgaagttatcccagtcttataggtaggttatccacgtgttactcacccgtccgccgctaacatcagagaagcaagcttctcgtccgttcgctcgacttgcatgtattaggcacgccgccagcgttcatcctgagccaggatcaaactctccataaaaattatgatgtttgattagctcataaatactaaataatgtttgtaacttatagttacgtttttggaattaacgttgacatattgtcattcagttttcaatgttcattaaaattatctatggagcgggtgatgggaatcgaacccacaacatcagcttggaaggctgaggttttgccattaaactacacccgcttatttaaattaagaattttgatgcggccgagaggacttgaacctccacgggatttctcccactaggccctcaacctagcgcgtctgccattccgccacgaccgcggatataggcatttaaaacatcttcgtttttcagaacgttatttattatattatgtttaaaaatatttgtcaataacttttaatcgtttttttacattaaattaatttgtgttatcagttgttaacacaacgctatttataataaaacatttagaacttattgtcaacatattttataaattaaatttagaattgactgtctttcaaatcaaagtttatttaatttgttcttttttaaggaacgtgtttaatcatactaactataagctgtacagtcaatagaaaagttcaatcaaaatgtcataaaaaatgtataattatcttttgtgctactttaaagctttaattgggtaaagtttatatattaattattactaaaatacgccaagatttttaatctaatcattttaatttcatcctatcaagccacaatttatgccattacctatatcataagtagaaaagccgagattgcgaagtattaaattacgacaatctcggctttaaacattttataaacacaatttcttcttattcaattactatgtttaccaatcaaaataactcactgataaattctatataaattccatacaactcataaataatcttacatatacacgaattagctctatttgtattgtacttatttcaattgtcttttcattcttaattttccattgcaatgtccgcaacgcatacgattcgtatcaactttacggatacgtatatattttgcatgacatttagtgcaataatattcataatttgcccgttgttgatagctttcaatgctgttacaaaatctaggcgctccaacctgttggctcaatcgtttaaaatcttgatctttatgttgataacctttaccagcaatatgcaagtgataatgacacaattcgtgcagtataatttttacaacagcatcttctccataatgctcatattgttttggattaatttcaatatcatgggactttaaaagataacgtccgcctgttgtacgtaaccttttattaaaatatgcacaatgtcgaaacgtacgtccaaatttttcttccgaaagatgctcaaccattcgctgaagtttgtcattattcatgtggatcaatcatcgttaatgatactttgtctttatttttgtcaatactgtaaatccaaacgtcaacgatatcaccaacactgacaatatccattggattttttacgaacttcttagaaagtttcgaaacatggacaagtccatcttgtttaacacctatatctacaaatgctccaaaatctactacatttctaactgtaccactcaatttcattccttcttgtaaatcttcaattgatagcacatcggatttaaggattggtgtttcaaactcgtcccttggatctcgattaggtgctttcaaggatttaataatatcctctaatgtaggcacaccgacttgtaattcaatcgccagttcatccatatccaatgaatttaatttagcttttaatgcgtcactgcctaaatcattgccaccaaatccgagtttatctaataactgatacgttactttatagctttcgggatgaatcgatgtattatccaatggctctgaaccgtctactattcttaaaaatcctatactctgctcaaaagttttagcacccaaacgcttaatcttgcttaactctttattatgctttattgcgccattttcttctctatatgcaattatatttttagcaatttgcgaacttagaccagacacatattgtaataatgatgatgatgctgtattgacatcaacacctacttggttaactgctgtttcaacaacgaaagttaatgcattttctagtgctttttgattaacatcatgctggtattgtccgacaccaatagatttaggatcgattttaactaattcacttaatggatcttgaacgcgtcgtccaattgatacggcacttctttcttccacttgaaaatcaggaaattcatctctagcaatttctgatgctgagtatactgaagcgcccgcttcattgacaatgatgaattgtactggcaactgatgctttttaattaaatctgcaacaaattgttctgtttcacgacttgcagtaccattgccaattgcaattaattgcacatcatacgctttaaccatttgtacaaaatccttctctgctgcctcttttttagaaactggtggatgcggataaatcacaccttttgctataaaagtaccgaatgggttaatgactgctaatttacaacctgttctaaatgctggatctacgcctaatatttgtttacctttcattggaggttgcagtaatagatttcttaagttttcactaaaaacatctattgcatgattttcagctttttcagttaaatcagcatggatttcacgctctatcgaagggacaattaagcgtttcaagctatctttaatcgcctctaaaatataactgcgatttacattattatgattgatttcttgacgtgcaatgaaatcctctactgatgtcgtatcgaattcaaactttacagataatactttctctttttcaccacgattaacagctaaaactctatgattagcaatgcgtttaattggctcactatatgcatagtacatttcaaaaatacctttttcatcttcagcatttttctttttagatgtagttaacacaccttgatgatacatatcttttaaaatttttgttctatatttaggattatctgaaatttgttccgcaataatatcttgtgcacctttgatagcatcttcaaccgattgcacttcttcatttataaattgttgtgctttttcttcaattgagacttcatgtttacgtgccttcatccatatcgctaatggctctaaccctttacgtttcgcctcagttgcccttgtctttttcttttgtttaaaaggcctatataggtcttcaacacgttgtaatttgttctgttttaaaatatccttctttaattcctcagtaagtaatccttgctgttctatatttttgataacttcttctttacgtttttgtaaattgaccatatattggtattcgtcatcaatttgctttatttgaacttcatctagtccaccagtttgctcttttcgatacctcgcaataaatggtactgtatttttttcttctagcagtgttaatactgcttcaatttgttttttactaaattgatatttctctatgattgaattaatcaattgattgtccatttacttaacccacactttttcttaaatttactcatttattttaacatattctaaaatacttctattaaggtatgatacttaatgtaattttcacttccaaaacatttaaaacgaatgattaggtcatactatattttaaaacgcactaagattattgaaaatgacacaccatcatttctaaatttcataatctaagactactttttttattctaatagcaacccacctatttaaaacgacaattagatatcttcttcacttaaattattaatactatatcgcgacatttatgtggatacacattaaactacactaataatgtattaattcgaaaatcttaattaaattaaaaatacccctcgatttcaatttaataatcaagggataattatatggatttttcattataaaacgtatcattaataagcaaattctattgatgtgctgcttcttgtaatttcttaattgccgttctctgaagtcgtgatacatgcatttgacttaaaccgatacgctcacctgtctctttttgactcaatccttcaataaacgtacattgtatgatttctcgttcgcgatcagataatataggtaatattttttctaaaatcatacgtttttcagttaggtcataatggtcatcttgttgccccataatatctaatagcgtaacagttgaaccatctttatcagcttcaatggaatgatcaacacttaacgcattataactttgtcccatttccattgcttctaacacttcttcttctgagacttctaatcgatcagctatttcactgatagaaggtgaacgctctaattcagcggttagttcatcgctcacttttttgattcttggcccaatttctttaatacgtctcggaacatgtacactccaagttttatctcgtagatatcttttgatttcaccgattacagtaggtactaaaaaggcttcaaacttccgttcaaaggacatatcgaatctatttatggcacctattaaaccaaccataccaacttgaactaaatcttcgtgatgtgattgtcctttagaatatttatatgccaatgactcaattagtttttggtaatgtttaactaacttatcctgtgcatctgtattcttattttcttggtgttctttaatccattggttaatttgctcaggtgaaatttcattagctgatttcgactctttcgccattatttcgcacctgctctttttttatatacttagtcatactgattgtcacaccagattctttatatactgtgacttcatccattaaagattcgattaaaaataaacctaggccaccttcgcgtaaaaagtctatattttcgtctttatcgtaaggacctatttttgatttagttgtttcataatcaaaactgtcacctttatcagaaataacaattttaattttatcttctaaaatttcaaaatatatgttaataatgcccacattgttattttctttgtatgcatgtttaactgcatttgtcacagcttcactaactgcaatcttggcatcttcaatatcatcatatgtagcaccagctctcgaaaaaacgccagaaagtgttaaacgaattaaacttacatactctgccgatgctggcacgcgcatttcgataaaatcttctttagattgcatgttattcgacctccgttccttcattaacatgcattaaatccttaagaccagtaatttcaaatagtctaccgatacgatctgacacacctaaaatgtatagttctttatcattttggtttaatgcttttaatgtacctacgaataaacctaaacctgtcgaatccatataactcacattttctaaattaacataaatatcacgagttccatcttgtctcataggtgttaaaacctcttctaattcaggcacagtataaacatctaattctccaccgactttaacttcgtaaaatttatcttgagtggttgtttctatattaagattcatttcattacactcctacttattaaaaatatttatcttcattttaagcgctgtatccaccatatttatatttcaaattattatatacccatcgaaataatttctaatcttcttttttaaattaatttactctttttataatcaaaatagtcatatcatcttttttatttgggttttgaagctttaaaattgcttcatagataatttgaacaatatcttgtgggtgcatatgtttatgttttttaatatattctaaaagtttttgtttatctataaaggtaccttcactatttctagcttcagtcacaccatccgttaaaatgataattaaatcatcaaggtatattggaatttcttgttgttgatatcgtgtttgtgaactgattcctaacactctacctctaactgaaatttcttcaaattcttctttttcagcgcgataaatatatccaggctcatgaccagctgaactacaatacaataaatggttcatttcttcatataaaccataaaacattgtgacgaacatattttgattaatattcttttcaacaacacgatttaaacgttttaaaccatcactcggtaattgtgagtgtccataagaatccatgccaaactttatcatactcattgctaaagcagctggtataccttttccaatgacatctgcaacagcaaagctcattgtgccatcgttatggtcaattaaattaaaataatctccacttactttttgtgccgccactgaaataacgccaatttgaatactatcaaattgtggaatatctgttttaagcattgtttgttgtaagctagaagctaagtctatctctttatcgtgaacttgaagtttatctaccaatctttgataatctcgataactataaccaaagcctttaacgatttcttgtaagacatctaatgtcttgaacacatcttcacgcgttaagtttaacgtcaatatatagtttttgtgaatatcgacaatgtcttcaggcaagacgtccttacgaatcacttcgtcagtgtatttctcacacttttttatcaattctactttatcttggcacgttaaactttcatcaattaaacccttataatgttgcttaaattcttccacgattagttgcctcctcacttcccttacaaagcaaatgcttaagcaaggataattatgattcacttactaacatttatttaattgcacttatcaattttgtcgtttgcaattttgctgtagatgatacttttaagctaaaaaaaactttaggatggaatacctaaagcctaaaaaacttaagacatccttttataataaaaaatatgaatatcataactggtatttgctaaaatctttgtttataagaaaattcttcgtacagaatttagaaatagttataattattataaagttattgtcttttatatcaatattttatttatctctgaaaaatacatataatagacgcctaatttttctggtgagctactgcattcagccctaaactaatcattagtgcattatctacttctttcattttatcatcggataagtacgtcagtttttctttcaatcgttttttatcaagtgtacgaatttgttctaataatataactgagtctttatccaacttatactttttcttttcaatctctacatgtgtcggtattttcgctttattaatcctaccagttattgccgcaacaataactgtaggactatatttattaccagtatcattttgaattatgactacaggtctgactcccccttgttcagatccctgtactggtgataaatctgctaaataaacatctcctcgtctaatcattcattcgttgaattagaagataaatatgtttcgttgcaatcgcatgcttcacactctatcggaaaagcttcgttcgctagggagagatttaaatcagccatttgtgaatatccttcttttaaagattgttctaaactatgacttctattttgactaaaagataacatatgagaacctccaattgattccaaaagttattaaatgacctttaattactctaatgataacaaattttatatgcactgaccatattattttaacaattcatttgttacaaaacgttgatcaccatcatgatagattcgcggcaaacgtctcgacaagttacaaagcacttcataattaatagtatgttgcttttcagctaccacctctaccgactgtggactttctctatgattatctattaaaatcaccgaatctccagctttaacttgatctggcactttaacaattgtctgatccatacatacgcgaccaataacttcgcattgatgaccatttacatttacaaagctaccttgcattatgcgtaaatagccatctgcatatccaataggtaacaaagctattgtagttgggtcagtagctgtataagttgcaccataacttacagactcacccgcttgtagcgtctttgtttgaactacattagcaattaattgcacacttggtttaaggtgtactttaactttttgctgtacatactctgatggataatatccataaagggaaattcctggtcttattgcattacagaattggcaatccattaatagagagcctgctgagttctgacaatgtatatattcaggtttaattgcttcattgaccatatctttaaaacgttgatattgttcagttgtcatatctcctggttcgtcagcacaggcaaagtgtgtaaacacgccttcaaatacaagttgctcatattgttgaatgatttcaatcacttcttgatacgtattagtatctttaatacctaaacgtcccattcctgtatctaatttaatgtgcaaccataactttttctcttgctcaccagaaatgtttttaattgcttctttcaaccactgtttagacggaaccgttaaggcaactcggtgttgtatcgctttatcaatatctttagctggtaacacacctaagactaaaattttagcagtaatcccatgcattctaagttctatcgcttcatctaacgttgctacagcaaaaaatgtggcgccattttccattaaatgacgtgctactttaacactacctagtccataggcattggctttaacgacagccatcactgttttatttggatgcaatgtactgaatactttgaaatttgatgcaacagcgtttaaatctacattcatatacgcagatctataatatttatccgacatattacttcctcctgtaattcccacacgttttaaaactagatcttaattatcattgtataacaaatttaaaatgctgacttttctaaaacaacttggctcatcgcataatgctcagtgtgtgagatactaacatgtacgatgaacccttcgtaatcaatctttggtttgccaagttcgtcgttgtaacagtctatatcgttaaaagctacatgttttcctaagcctgtgcctaatgctttactgaacgcttcttttgtagcaaacctgccagctaaaaattcaattttacgttgctcatgtgtgaaattgttgaatttgtgctgttcatttttagttaaaatccgctcaaccaattttggctgcttactatataacacttttattcgatcgatttcgattaaatctacaccaattccatgtatcattgattattcctcatttttattgttttctaaatgtctctcgttatttaaccatcgtttcaatctacgtgcttcacttctatctattaattcaatttcagcttgaccacccgctgtataaagggtcaaagttgctaatcgatagcgtctcattataggaccaacatcgatatcaatattttgaatacgaaaatatggtattactttttcatccaaaaataaaatgccgtttcgtacacgcaaatggtgtttttcaaatgcatatctgcagtgcttatatcgatatactggcgctatgacaagcgtgaaaacagcaacaagtaatattataatcacactactaacaatggatatattgttatctaatatctcccaaaatagccagttcaaaatattaaatgcgattaaaagtacaagcgctatgggtatccaaaacagcacagcacttaacctcatcacttttttagcgtgtggtgacataaaattataatccctcatcattttcacctcttaaataccatgatttcaatttatttgcatcttcacttcttgcgtattttaggttaatcgattgggctcccacacctttagcaacaataaagctaaaattatttaaattgttgcgtttaagtaatgtatgttgccaagtgtcaaatcctataatgtgatgcgctttaaaataataaatatttcgtttcaatagctcgaaattctggatagtaatttgttcttctgtcattttaaaacccgcatgtttgacataaagatatcctttgatcacaaataaaccaataatgactattgttataatcgtaaataacaataataattgattccaaaaataacagccaatacctgccatagctatgacaataatactaggtattaaaaagtgtctgtggaaacctgacaaaggcataccttcattaacttgttgataagataaatctggtactaaattctggataatttgatatgctttgtctcgtttaataaacggcaatatcggcacactacctgaatcattgtcatcatcttcgatttttttattttcaaaatcacttgtgatgataaaatgtattgctgtgtagccaaataatcttcgtatatatgactgacgttcaacaacagcttgcaatcgtttcgttggtacagttactttcttcttgttaaagagaccatattcaattttaagttgctcattttcaagcatcaccgaaaagccataaaatcttatcatcgttataatcgttccaataatatatgccactattaatactagtaaaatgatgattaatactgaaatacttacaatttgaacccattgactaatttcatgatttagcttcgaccatgggatcaactctcttacagccccgtaaataggtactaaagctactaacgttacaccaatggcaccactggtcattgccataaatagtgattctttaaaattcatctgatatataggaatgcgtttatttttctgattaagcatactatcagtgttctgcacttcatctaagcgaccttctgcgatgtcttccacattaccttcaatgtcatgattacagttgtcattcttctcagcactagacttttgcgccacttctgtcttcaactctgtttgcaattgatcaatatagcgttcaagatattcaccttgttttttcgaaataacacttaagacaataccatcacttggtgttttgatttgtaaatccacaccaccaataatttgattgacgaccccttgtgtcatatcaacggactgaatacgttttatatttaattctttacgctttttattaaaaatacctgttgttaaaatgaaataattatcctcaatccaatatcgcgtgttcataattccgacaatttgagaaatgtatgatattaaaaagaatacaaatacaatacctatccataaatatgattcgggattcgcatagtcaaaatctttcaattgaaagataatgaaaataaaaaagacgactatgttttgtttgatagcattgattatgccattaaaatatgaaatcggatgtaatttttgaggttcagacatcactttcaacccctctcaaattcgacatagttctcgcttcgattattttaacatcgtcatgagacatcatcggtaaataaatagtatgacctgcagtcataaatccaactttatacaaattaagcactttactaattggattagatttaatcgacaagtattgtaaacgttcaattcgactcgtttcttctttatatataaaaaatgatgtacgatattgtacacttagttgatcaactttataaaagcgacaatgatattgccataaaggcttaataaataattttaatgtactcagagcacctaaaaccaacaaaatataaagtaagtaatgtggccattcaaatcttaaccatataaaataaaaaatgacatacacagctacactcaatataaattctaagccattcgtaatgtagtaatacaacaatgctgacttaggactcttagacaacttagtataatctgacatatacccctctccccaaataaaaaattatacggatttataatctatttcattttatttttatatgttgataattatagcatatggaatatttcatgctaatttattcttcctaaaggtacatctaaaaatttagttaagcagaaagtgcttgaattgttaaaaagacaccatgttataattttatcaacatgatgcctttcatctatattcaatctttcatcttatcaagagcaatatttagttcaagcacattcacataatcatttgttaacacaccacgctgcttacgatgttgaatcaagtcggccactcttgaagtagatatatgacgagcatcagcaatacgaggtgcttgcttcaatgcattttcaaccgtaatatgcggatctaagcccgacccagaacttgttgcagcatctattgttacatttgaattcccaaatttaacatgatgtttcatgcgtgctattaattcggtgtttccattcgattcattacttccacctgatgatacgccgtttttatataatttttcaggattcatattataatcaactgcactcggtctcccgtgaaaatatcgtgtctctgtccagtgctgtccaatcaattttgatcctactatacgattgtcatacgtaattaaactgccgtttgcttgttgataaaaaaatatttgaccaattaacgtgatagctaacgggaataaaaatccacataataccatagttattatcgttaaacaaatactatttcttatcgtattcatggtacaggctccttcctctttacacaaaaaattgtacaatcatatctattaatttaatgcctaaaaacgggacgattaatccacctaatccataaatcaacatattatttataaaaattctatcaatgctgtaaccctttacttttacacctttcatggcaattggaattaaggcaacaatgattaatgcattgaatatcaaagctgatataattgcagatttaggtgacgataaatgcataatatttagtgaagtcatttctggaattgttgacatcattagtgcaggtaaaattgcaaagtattttgctacgtcattagccaaactaaatgtcgttaatgcacctctcgtcattaataattgtttgcctatttttacaacctctattaactttgtaggattcgaatctaaatcaattagattagctgcctctttagcactaattgtccctgagttcatagctaatcctatattcgcttgtgctagcgcaggtgcatcatttgtaccatctcctgtcatcgcaacaatatggcctttcgcttgttcatctttgatgactttaattttatcttcgggtttacactctgcaacaaatctatcaaccccggcttcttttgcaattgtagctgctgttaaagcattatcacctgtacacataactgtttcaatccccatttttctcaattcagtaaatcgttctacaagaccatctttaatcacatcttttaaataaatcacgccaagcatgacattgttttcaatgactattaatggtgtgccacctttactcgatacatccatacagagagactcaatattaagaggaatattgccttgttgttgtttgacaagatttatcatactattaggtgcacctttgaataccgatatttcatttgtaatgattccgctcattctagtttcagctgtaaaagtcttatatgtgccatcaatgtctttaggcagctcatatatatacatctgcttcgctaatcgtacaatactttttccttctggcgtatcatcgtagattgatgacatataagcagcgactatcaatttttccagcatttgttgattcactggtaaaaattcactagcgattcgattgccataagtgattgtgcctgtcttgtctaaaatcattacatcgacatctccacatacttctacagcacgcccacttttcgctaatacattgaattgagtaacacgatccatgcctgcaataccaatcgccgataacaaaccaccgattgtcgttggtattaaacatactgttaacgcaatgagcatcgcaataggtaaaattaaatgcaggtaagatgctattggatataacgttacaataacgactaaaaatataattgttaacgttgttaataatgtaaaaagtgcaatttcatttggtgttttatttctttccgccccttcaactaaggcaatcattttatctaaaaaagatgtacccgcttcactctcaacacgtatttctaaccaatcagatgttacaagtgtaccgccaatgactccatcaaaatcgccacctgattcttttatcacaggtgcagactcaccagtaattgcagattcatcaacggttgctaatccatttattacaacgccatcaacagggattgtttctccattttctacccgaatattttgtccggcttttaactctgtggcgttcactatccgatacgcaccattttcttctatcaatcgagcagttaaatttgattgtgcttgtcttaaactatcagcttgcgcttttccacgaccttcagcaaaggcttctgaaaaattagcaaacaatatagttattaataatatgataaaaattgtaatcaaataacctcgcgatagataactagttccaaatatgtcaggaaaacatattaatatcaacgttaaaatcattccaacctcaacgacaaacattatcggattttttattaattgtttaggattcagcttataaaaactcattttcaaagcttctatcaccattgtttgattgaaatatttatttacatgatgcattttttccatccctttactttattttaaagttaaaaattcaccaataggaccaagtaatagtactggaataaatgtcaaaccacttagtaaaacgataaatacgattagtgatacgccaaaataaggtttatcaatcgctattgtatatttatcttggtggtatgattttttattcactaaacttgatgcaatcattaattgcaaaataattggtatataacgagaaagcaacataatgattcctgtagagatattccagaatgttgtatcatctttcagtccttcaaaccctgatccattgttcgcagcagctgatgtcatttcatacataacttgcgaaataccatgaaaagacggattcgttatactttcacttgctccaggaatcataaaagcaagtgctgaaaatactaaaattaaaattggatgtatgagaaagactaagacaatacatttcatttcacgggcgccaattggcatatttaaatattctggtgttttaccaaccatcaaactgcatataaacaccgtcagtaagacatatatcaataaattcatgagtcctacgccttcgccaccaaatacaacatttagcatcattaataccattggtcctaatccacctaaaggcgttaagctatcatgcatgttattaacagaacccgttgtaaatgccgtcgtaataactgtaaatagtgctgacaagcctgctccaaaccgtacctctttaccttccatattcggtccataaatgcctaaattcgctagtattggattaccacgatactcactccacatagttaatgtaagaattgctataaaaatgaaaaacattgcgacaaataatatcaacgcatgacgatgtactcgtttaccatgtctacttaacatgcgaccaaataagaacaacattgacataggaagtaacatcatactgcccatttctataaaattgctccaaatatttggattttcaaaaggtgttgcagaatttcctgctaaaaatcctccaccattcgtaccaagatgttttattgattcaagtgatgcaataggtccaaatgcaatatgttgaatatgtccgcttaaagtccgaatcattaaattagcatgcaacgtttgtggtacaccttgagtcatcaataaaatactaattaaacatgataatggtaaaactactcggacaataaaccgaacaatatcttgataaaaattaccaatgatattagttaatccagttaaacgtctcaacatcgctatacaaacggcgtaacctgatgcactagatgtaaacattaaatatgtcattacaatcatttgcgttaaatatgtcacatctgattcaccgttatagtgttgtaaattactatttgttaaaaaagatattgctgtattaaacgctaaatctatcgattggtttaaattatgatttggatttaaaaaaagccattgctgaactattagcaatacaaatgttataaaccccataaatccattaaatgccagaaaatgtttgacatatgttttagctgacatgtgttctaaatctgtgccgataattttaaaacacatattttcaaatctagtaaatattaaatctactcttgacgattgcaccaatgctacgcgatatagatatccactaaaaacatacgtaatcataaccatcattgttagaaacaaaattatttccatgataaccctcacttaatatatttctaaaatttttcactacgaattaaggcataaaataaatacaaaactaatgcaataactaccagtaataaaacgatgagcattgccataacctccttacaacacaacaacatcgtaacaacttgtttatgagagaaatattaattttcaaacttagttattaagaaatcattaagatgtgtatgcagaaataaattttatagcatttaattgtgaagaatattatgatattgctatcgaggtgaaggttatgtcaaacactgaatcgctaaacataggaaaaaagcgtggatctttaacaatttacatcggttacagtccaggtgttggtaaaacatttgagatgctttcaaatgccattgaactatttcaaagtaacgttgatattaaaataggatatattgaaccgcatcagcgtgatgaaacaaatgcattagctgaacaattacctaaaatcacaaccaattttactaaacatggtagtcatcattttcaatatttagatgtcgaccgcataatcgaagaatcgccgacaatagtacttatcgatgagttagcacatacgaatatttctagagatcgtcatgagaaacgatatatggatattgaagaaattttaaatcatggtatcgatgttcataccactttgaacattcaacatattgaaagtttaagtagtcaaattgaactgatgaccggtgtacatgttaaagaacgtgtacccgactatttcataatgagcgccgatgtattagaagtcgtagatatctcacctgaacaattaattaaacgcttaaaagctggcaaggtatataaaaaggataggctagatgtagcatttagtaatttctttacgtatgcccacctaagcgaactgcgtacattgacgttaagaacagttgccgacttgatgagtgataaagaaaaagtccgacacaatcataaaacgtcactcaaacctcatattgctgtggcaattagtgggagcatttataatgaagcagtaattaaagaggcattccatattgctcaaaaagaacatgcgaaattcactgctatttatatagatgtattcgaaaaaaacaggcaatataaagatagtcaaaagcaagtgcatcaacatctcatgcttgcaaaatcattaggagcaaaagtaaaagtagtttatagccaaaccgttgcattaggattagacgaatggtgtaaaaatcaagatgtaaccaaattaattatcggacaacatattagaaataagtggcgagactttttcaatacacctttaattgaccatttaatgtcctttgaacatagctataaagtcgaaatcgttccaatcaaacaaatacctgttgaattgaaaatgaacaaatcaccctatcgtcctaaaggcaaacgtttcgccatagatatgttaaaaatgattttgattcaaataatttgtgtaatgatgggactgtggatttatcaacttgataagcatgagtctagtacgattattttaatgatttttctcatcggcatcattttgttatccatttggacgcgatccttcatcattggctttttagcagcaattattaacgtatttgtttttaattatttttttacggaacctagatatacatttgaagtatatcgctttgactatcctattacatttatcgttagcattttaacaagtattttaacgagtgctttattaaaacaaattaaattccaatactccattactaaaaagcaactttatcgtacagatttattatttcaatttaatgattcgattaaacaaacttatacagttgaaaacttactaataaatgctggataccaaattaatcaattattgcaacaatcaattactatatacgttatcaatcaatcgaaagtaattaaaacaataccattgcaaaaccatatcgataatacgactcaacagcatgaacaagcattaagctgggtaattaaaaatgaaagacaagctggtgcaacaacagatacatttccaggcattaataaatggttgataccaattggcacatctccgattaaaggcattctagccattgattaccaaagttctcaagtgattaatccatatgatgcatcaatattagaatcaatgttaaatgaactttctctcgccgttgaaaatgtgacgttacttaaacaaacgagagaatccatgttacaggctgaacgtcaactgacacattcaaattttttaagatcaatttcgcatgacatacgtacaccgttaacaacaattatgggaaatttagatattttagtatcacatagtaaagatatgtctatcatagaaaaggaacaattacttgtgcatagttttcaagaaagtcagtatttatatctattagtgacaaatattttatcattaacaaaattacagtcatcaaatgttcagataaaattgcaaccttatctcgttagtgaattagtagaagaaatcgatatgattctagaacgtcgccatttaaaaaagcgtataactgtatcatcctcagtagatttacagtttatacacattgacagtaagttgattttacaagctttattcaatttgattgaaaatgcagttaaacacacttctactgacaccaaaatcaatttatctattcgttatgctagcgatgaacaaatcgaatttgccgttatagacgaaggacctggaattagtttagaagaacaacaaaagatattcgagcctttttacacaggatcaaataaatattttaaagataaccaaaaagaaagcatgggactaggcttatatttagtacagactatcctacacaaacatcaatcaaacttacaatataaaccgaaccaaccacacggcagtatattctatttcaatatagatacagactttaatgaaggagacgtataatgcaatctaaaatattgataattgaagatgatcacgcaatcacacatttacttgatgttgcattaactttagattattacaatgtaactacagccgacaatgccacacaagcacactttaaaattcaaattgataaaccagatgtcattttattagatttaggtttaccagataaagatggattatgtttgatttcagaaatcaggcaacatactgacattcctatcattgtaataagtgcaagacaagaagaacaaacaattattcaagctttagataacggtgcgaatgactatatgactaaaccttttaatgttgatgagcttcgggcacgaatacgagtcatcgagagaatcgctaagtcgcatcaagaaactaacattgtatttactaacggtttgctaagcatcgactttggctccaaatctgttgttattaataatcaggaggtacatttgactccaaatgaatttagcttgttagaactattgtcaaatcataaaggaaaagtactcacttatgagatgatattaaaacgaatatatggctatgttaataagactgaaatgcctagtttaagagtgcatatgacatcattaagacaaaaactttcacaatgtcatgaggacgcaaaagatattattaaaacacatccacgcattggttatcaaatgttgcagtggaaagagaaataattaaataaaaaagatcctgccattaaacgaatgattggcagtgatcttttttatattcaacttattatttatcgcgcactagcgtcagcaaaaagccctattatttttttacaagaacatgatactgaaatttcataaagtttatttatgttcgattattcttaatttaaaaatagttctttaaattatatactcaccacatttggtggagaaccatatttacacagaatgatataaccgcatacagatctcaatccaattaaatatttaacctttaaaacgttagtactttgatatctacagagaatcaattattgaaaacaaaaaagagctcaagacattacatctttaagctcttaatctataaattatttttgatggtcagcaaatgtgcgacctttcataggtctgcttccaccgctgctcttctctttacggtcgaatttttttgtacttttctttttacttgagtatccttttgaacgtttactcttactgtcaaatttaggattaccacgcttactatttctgttacgagaaccgcttggtttaccgttacggcctttgcgagataatggtttttcaaaagttaattgaacttcaacttcatcgttcgcttctactaactcttgtaaaagtgcagcaactaaatcaacatcgttatattcatttaacaactctgtagaaatgcgtttcaagcgtgattctgactctttagacatccagttttcaactttttctttgatgtcatcttcacgtgcttgaagtacttctttacgatgaggtggacgaagtgcgctcatttttctaccattagcatcttcaatttgtctaatgtaatccatttcaattggatttacaaatgttaccgcgataccttctttaccagcacgacccgtacgaccaatacggtgtgtatagctttcagtatcttgaggtatatcaaagttataaacatgactcacaccagaaatatctagtcctcttgctgctacatcagtagcgactaaaatattaatttggtcatttttaaatttctttaatacttctaaacgtttcgcttgtgtaatatcaccatgtaagccttcagctttatatcctttagaaatcaaagcacttgttaattcatcaacacgacgttttgtacgtccgaatacgattgctaattcaggttgatgaacatctaggaaatttgtaaatgtatcaaatttctctaattctttaacaattgtatagaattcttcgatttgtggatcagacatttcattattcattgtcttaatgatttttggtgatttcataaattgttgtactaaagcttggattgctttaggcattgtagctgagaacaacattgtttgacgttgtactgctggaattttatccataataaatctcatatcatcgatgaatcccatattcatcatttcatcagcttcatctaaaatcaaagtatgaattccgtccgtttttaatgtgcgacgatttaaatggtcgataacacgcccaggtgttccgactacgatttgtgggccttttttcaaggctttaatttggcgttcgataggcataccaccgaatacagtaacaacttggacaccttgtccacggctaaattctcttaattgttcagctacctgcattgccaattctcttgtaggtgctaaaatcaacgattgaaccccttgtttccctactactttctcaattaaaggaataccgaatgctcctgttttacctgtaccggtttgagcttgcccaaggatatcaattccttgtaacgcataagggatactgtctttttggataggtgtcggctctttaaatcccattgattcaagtgactgaaccgtattatccgaaatccctagttctttaaaattttgcaaaataattctcctttttacctgtttatttctcaatatacttttgcatataagttcattaatatttcatcaacttctatatagtaccaccaaaaaaatttaatcgcaataaagcaatttgcgaatatttattagaatcacattaattgattgtcatatttttgtcaaaaagctagcattagataagatgtaagcgttacgcatcattcgaataatcattataaaaaattttttataaaatacgtatatcgttaacattccacaacaaattttactgaaacacatgtaaaattagacattataatacaacatctttttgtaaaatattatataaacattcaaactacttcctatataatgtgtgtacatagaattaaccttgatttagtttcaaatttatagatttaacataaaaagaaaaaggcaattttgtatttacacacaaaaccacctcttctttgtaatcttttagtattaattcaaatcatttttataagtaaaaggtccctcgactaatctctatgaaattaaagcatttaccacttcttctaatttcataccacgtgatcctttaactaatacacggtcatgcgcttttaaatcgcttgttaaaacttctatcatatcgtctttagaattgaagtgttgtgctttttcgacatgttgctggcccgaatcataaatatacttcgcttcattaccaaacgtatacaacacatctatatgcttttcttctaaataattacctacaccgatatgcatttctttgctattttcacctaattctaaaacatctcctaaaattagaatgcgacgccctgtcaaagtactcagtgtatcaatagctgctctcatacttgtaggacttgcattataggcatcatttatcacagtaatatcattttctaatgtatgttgctccatacgcataccagttaagctgacattttttaaattttgatagattgtgttatatgtcaaacctaattcatgaccaaccgcaatggcaatcgtcgcatttttcatattatgctttcctaatattggtagatcataatgttctttattattaatcgtaaatgaaatacctgtagtatctctatcatcaacagaacaaactaatgcattatcagtagcaacaccgatactaatacattttgcattttcaacttctttaacatgcggtttcaataatggttcatcgccatcatatataaacgtaccattatcttttagacctattgtaatttcagatttagctttagcaatcccctcgcgcgaacctaaatcttgcatatgtgactcaccaatattagttataactgcaatatctggttgagcgaggtttgacagaaattcaatttcatggaaacctgacatccccatctccaatattgatatttcagtatcattatctaattccaaaatagttaaaggtaaaccaatttcattattgtaattaccttgcgttttcttaactttaaattcggtatgcaatacactttcaatcatatctttagtcgttgttttaccattagaccctgtgacggcaattactttagggtttacatgtctcaagtaagcttgtgccaattgttgtaatgccgttaatgtgtcttcaacccatataataggcccgcttacattttcatctataggtgttcctctttgataaaaagcagctccagcaccatcttgtaatgctttagagacaaagtgatgaccgtcaacattttcacctttaaatggtataaataacatatttttagaaattgctcgtgaatcaattgtgactccatttatcacttgatttaaaaattgatcttcaatttcacaaggaatccatgattgaatttgctttaatgtaacattaatcataataacaacctcagttagtcaattttgtatttatttttctgtttatcctggtgacgttctttagcaagctcgataagttttgtaatcagttctggataagataagcccatattttcccataattttggatacatactgaaagccgtaaatccaggcattgcatttgtttcattaatatatatttggttgtcttctgttacaaagaaatcagcacggactaaaccagaacaatctgtcgctttgaatgcctctaatgccatatttctaagcgttaattgaacatcttcgtctaagtcagctggaatttgtaattgaaccttaccatctttatattttgatttgtaatcgtaaaacgcgacatcttttacgacttcacctggccatgtcgcttcaggatagtcatttcctaaaactgctacttcaatttcacgtgcgttaacgccttgttctataacaagcttacggtcaaattggaatgcttctttaataccttctttaagttccgcttcattattacatttactgatacctacacttgaccctaagttagcaggtttaacaaagactgggtaatttaatttatcatttactaattttaaaatgttatgttcatatttttcatattcagaacgtaagaaactaatataaggtaactgtggtaaccctcgatgttcaaataattgtttcattacaagtttgtccatagaacttgcagctgacaatacaccatttcctacatatggtacatccaaaacttcaaaaagtccttgaatcgtgccatcttcaccattaggaccatgtaataatgggaatactgcatcgtatggttgtcctgaactactttctttcaatagctgtgaaatctcaagcgcctctccattttctaaatgaagctcatcagtagatttaatttcagctgtaatattattttgctttctccaatcaccatcattggtaatataaatgatatcaacatgatatttgtctttatctattgcatttaatacattttgtgctgtcagaatcgatacttcgtgttctgcacttttccctccaaaaacgatacaaatattttcttttgtcatttcgttttcctccaatgatatatcagggtttgctaccttaatataaattaatattgatttagtcctattgttaattgatttattcgcatctttgaatcttaatagtatcacattttaatgctattttgcattttaaaaacgaggacttatgtgtctgtatctatgttgattcatttataatcagaacaatattcccttctattttattcctaattcaaattgaaatctatagctgatatcactgtgatattctagctaatttttaaaaagtcatgtaaaattgatataaacattagtgagtataaaaggagtttgcaatgaattattcatctcgtcaacagccggataagcattggcttcgcaaagtagactgggtattagtagccactatagctgttttagcaattttcagtgttctgcttattaactcggcaatgggtggtggtcaatacagtgctaatttcggtatcagacaaattttttattacattttaggtgcaatttttgcaggtatcatcatgtttatttcacctaaaaagattaaacattatacatatttattgtatttcttaatctgtctattattaataggcttgctcgttattcctgagtcacctattacacctattatcaatggtgccaaaagttggtacacgtttggccctatcagtattcagccatctgaattcatgaaaattattttaattttagcattagcgcgtgtcgtttctagacataatcaattcacattcaataaatcattccaaagtgatttgttattatttttcaaaattattggtgtctcgttagtaccaagtattttaatattactgcaaaatgacctaggaactacattagtattagctgctattattgcaggtgtgatgttagtaagtggtataacatggcgtatcttagcccctatctttattacaggtattgttggtgcaatgacagtcattttaggtattctatatgcacccgcattaattgaaaatttattaggtgtccaactgtatcaaatgggacgaatcaattcatggcttgacccctatacatatagtagtggtgatggctatcatttaactgaatcacttaaagctatcggttctggacagttactaggtaaaggatacaatcacggtgaagtttatatacctgaaaatcatactgactttatcttttcagtgattggggaggaacttggctttatcggttctgtcatattgatcttaatatttttatttttaatcttccatctaataagattagctgcgaaaattgaagatcaatttaacaaaatctttatcgttggtttcgtcactttacttgtgttccatattttacaaaatattggtatgacaattcagttgttaccaatcactggtattccattaccatttattagttatggtggtagtgcgctatggagtatgatgactggaataggtatagtcttatcaatttattatcatgaaccaaaacgatatgtcgatttataccatccaaaaagtaattaatttaaactattttgagtttcaaatatcataacttttcaagatgacgttatatagtctatttacgtcgtcgatttaaaatgtcatatatagatattactcgataataacaatccctctttgaagtacacattgtaaaatgtacactctaaagagggattttgttatatagtacttgctttcattttagtaaatccagtcaaaaaagctatcatcgaatagtccgacgatagctttaacggtgtgtgattcacaatcacagtcaattattttaattcgtgacttactttattagatgctggcaaagtattaataatgtctaaacgagatttagtttttttaatattcacacctaatgatgacaatagtttgactacattttgaatcttttcaggacgtttcattattatcacctcgtttggatcgctttcaatattatcttaccctattcgacatacctttactacatcatttacaaaatttttaatttattttcaaaattaaaatctatagcgcactctacattataccctaaaatacaattttgtatccttcatcatagatttctttttcaatactattcaaatttgctggtgtctcatacgatacagttacttgaccatctattatattaatattcacttgatgaacacctatcatatttgaaatgcgttctgtcaattgacttacttgttcttctgtttcaattcccgctgtgtaaatcgtattttgatgtatcatcttaaactcctttagtctttaatcaatttttgaaaagtcactaataactcttccattgcctcttcctgagcaccttgattaactttattcataatacaacttttcatatgttgttctaataactttatcgcaacactgtttaacgccgaacgtgtcgctcttatttgcgtaaggacatcatcacaatagacatcttcttcaatcatgcgattaatcgctctcacttgtccttcaattcgatttaaacgtgatttaagattcgtttttatttgttcagaatgatgtgcattatcttgttcagtcatagcattcactccttcatttacattccttactatactatatcccataaaacacaacgtcaacacaaagtgtgtttttcaaactaaattgtcatgatatttaaattgcttcatgatacaattaataagatatactactcgtttaagattttcgatgggaggtttcaaatgatagagttattatccattgcactcaagcattctaatattattttaaattcaatatttattggtgcatttattttaaacttattattcgcctttaccattattttcatggaaagacgttctgccaattctatctgggcttggttactagtcttagttttcttgcctttattcggcttcattttatacttactattaggacgacaaattcaacgtgaccaaattttcaaaattgataaggaagataaaaaaggattagagttaatcgttgatgagcaattagctgctttaaaaaatgaaaacttttcaaattccaattatcaaattgtaaaatttaaagaaatgattcaaatgttgttatataataacgcagcatttttaacaacagacaacgatttaaaaatatacacagacggccaagaaaaatttgatgacctaatacaagacatccgtaatgctactgattatattcattttcagtactatattattcaaaatgatgaattaggtcgtaccattttaaatgaacttggtaaaaaagcggaacaaggtgtagaagttaaaattctttatgatgacatgggttctcgtggactgcgtaaaaaaggcttacgcccgtttcgcaataaaggcggacatgctgaagcatttttcccatcaaaattacctttaattaacttgcgtatgaacaatcgaaaccatcgaaaaattgttgtaatagatgggcaaattggatatgttggtggttttaatgttggtgatgagtacttaggtaaatcaaaaaaattcggctattggcgagatacgcatttacgaattgtcggggatgcagtgaatgcattgcaattacgatttattctagattggaattcacaagccacacgtgaccacatctcctatgatgatcgttatttcccagatgtaaattctggtggaacaattggcgttcaaatagcttctagtggtcctgacgaagaatgggaacagattaaatacggttatttgaaaatgatttcatctgctaaaaaatcgatttatattcaatctccctatttcatacctgatcaagcctttttagattctattaaaattgcggcattaggtggtgttgatgtcaatatcatgattcctaataaacctgaccatccgtttgttttttgggctactttaaaaaatgcagcatccttattagatgccggtgttaaagtatttcactacgacaatggctttttacactcaaaaacacttgttatagatgatgaaattgcaagtgtgggaacagctaatatggaccatcgcagtttcacattgaatttcgaagtcaacgcttttatttatgaccaacaaattgccaaaaaattaaaacaagcttttatagatgatttagcagtatcttctgaattaacaaaagcacgttatgctaagcgaagtctttggattaaatttaaagaaggtatttcacaattattgtcacctatcttataaaatagaaatatgaggagtgtaactttaatgcaacaatcagacgtcattagtgctgccaaaaaatatatggaatctattcatcaaaatgattatacaggccatgatattgcgcatgtatatcgtgtcactgctttagctaaatcaatcgctgaaaatgaaggtgttaatgatactttagtcattgaactcgcatgtttgcttcatgataccgttgacgaaaaagttgtagatgctaacaaacaatatgttgaattgaagtcatttttatcttctttatcactatcaaccgaagatcaagagcacattttatttattattaataatatgagctatcgcaatggcaaaaatgatcatgtcactttatctttagaaggtcaaattgtcagggatgcagatcgtcttgatgctataggcgctataggtgttgcacgaacatttcaatttgcaggacactttggtgaacctatgtggacagaacatatgtcactagataagattaatgatgatttagttgaacagttgccaccatctgcaattaaacatttctttgaaaaattacttaagttagaatctttaatgcatacagatacggcgaagatgattgctaaagaacgtcacgactttatgatgatgtacttgaaacagttttttacggaatggaattatcacgactagacattgaagttgtagtatgatgatgcgatgtaatggcgtgttgttgtggaagcttggtgtcatgccgttacgattctatgatatgttgttgggacgttgcaatgtgtattatgccgttgtgacgttattatttcacactgttacatgtattagtgaattgctgtggaaatttgcgacatatactgctacactgatgaatcattgtgtcaagatggcattgcgatgaagaatgacaactctgttattaaccactttttacatactgaaatctcgttaatattatttcaaataaaaacagcagtaggatgactttcacatttgaaatcatcttactgctgtttctatttatcacatattgtataatgtgacactaagtttcgcttttgaagcgaaaaataatgtgcgccctataaagttaaaattatcttcaacttttagggtgcacattatttggacttgataaggttatttctttttctttttagacactacttgtgtgtttttgccttttttattgctgccgccgttgtgctctctttcatacgcttcaatgaaaggttgtacttcttttttagcgactttttcataataaatgttcgcaaagtgtgtttgaactacaaggaacgccgcactgactgaccagtacaaaccaagtgctgatgctgagcttaatgaaatccagataatcataattggtgaaatgaccatcatcatgtaacccatttgacgttgttcgtctggcatcgttttacttgatacatatgcttggataaagtataaaacaccggcaataattgtaatccaaatatcaggacgtcctaaatcgaaccataagaagtgtggatatttaaacaaaccatctacaagttggtctttaagtacaaagtataatcccatgatgattggcaattggattagcattggtaaacaacccaacatactcttaatcgggttcatgtcatactttttatatacttgcattaattcttggtttgcagccattttttcttcttgtgtacgcgcacgtttcactttttcttgaattttttcaacttctggctttgcaactttcattttttgacgcatcatatgactatttttatagtttgacaacatgaatggtaataaaataatacgaattaccaatacaaggataataatagctaaaccataattgtcgtttaataagttatttcccaaccaatccaatacatttttcattggatctacgaatgtattgtagaaaaacccactacgtttttcaggtttagaatagtcacaaccagccaaaaagaccataatacctaaaaataatggtagtaacgcttttttcttcatttttccacctctatcattatattcacataggatttattctatcacattaatgagtacgtatgaaacaataagtggaaaaatttaactaattattaaaaaaatctttgaatcgattaacagtcttttcaatattttcacttttagaaatggctgaaatgactgaaattccattggcacctgcttctacaatcggcgccacattattagtattgataccgccaatagctacaatcggtagttgcggattcatttctttaaacgttgcaatcatttttggacctactggtatatgcgcgtcatgcttcgacggcgtaggatagattggtccaacacctatataatcaacatgagttaaatcagattttgcatactcatctaaatcactaatactaagtccaataattttatcagtgaaatattgtgctatctctttgactttcgcatcatcttgaccgacatgtataccatccgcgttaatttcttttgccaaggatacatcatcattaacgataaaaggcacatcatattgatgacagagatgctgtaattctttagctaatacaagtttatcgtttccttttaaagctgattcacccttttctcgaaattggaaaagtgtaatccctgcctttaatgctgtttctaatacttcatgaatagttcgatgactcggaacatcggaggtcccacaaataaaatacacatttagatacgattggttaaacatattattccacctcttgaatacgaatccgttgttgataggttgtttcatttaaatgatataacgtatcaagcaacaatggtgaaaacgtaccaggaccaccacaattttcattttcagcagctacctcagcagcaatattaaatacgcttaccgcttcaattaacgcttctatgtctggttctgtttctctaaataaaaatccagcaataacgcctcctaataaacaaccagctccagttactcgtgctaataatggagatccattagctaatacgatggctttattatcttgaacaataacgtcctctttacctgtgattactattgcagttttatatgttgcgtaagcctttttcgctattgtaaccgcatcaagattagcatcactatctgtacctttcatagttgctgtatcatcaatcaacgctaatatttcagatgcattgcctttaattactgatactttcgctgatttcaataataatttacaaaattgctttcgatatgtagaagcaccaacagctacagggtcaaatacaataggtaagcctgcctcatttgccgtttgagcaatcgcaataatatcttgttcattttctgctgttaaagtaccgatattgattaatagcgcttgtgcaactttgtaaaattcttcagcttcttcgggagcttcactcattgcagggctagcaccaatacttaataaaccattcgctgtaaaatttttaactacatcgtttgtataacaaattgttaatgggttttcaatacgtattttatttagataattcatcgtctaatccctctttctttaaatatgcaaaatgattcactggacctctaccacggccgatttcaggcgtatattgtatactcattgaaataaactttttagccttgtgtacagcctcaaataatggtctaccttttgcaagttctgccgttataactgctgaaaatgtacaccctgttccatgcgtatgttttgttttaaatcgttcattttcaaatgtttgaacaccttcgttagtaaataaataatcttttgctatatcagtatcatttgaatggccgcctttaatgatgacacctttactaccaatctcattaataaagatgcggccagcctgcataattttttcttcactatcaatggttagtcccgttatttcttcagcttctggtaaattcggtgttactacatcagctaatggcaataacgtatgctgcaagttttgttttgtgtcattatccattaatgaatcaccgcttttcgccaacataacaggatcaattacatacggaatagattcatgttgcattaaataatgacgaatcgtttccatagtatctgctgtagcaatcatccccgttttaatagcatgcggtaaggtatcgttgaagacactatcaagttgttcatctatccattgatgatttaaattatgaatatgttgtacgcccaatgtattttgagcaacaatacttgtaacgacgcccataccatatacaccacatgaatgaaatgattttaaatcagccattacgccggcaccacctgttggatcagtacctgcaatggttaatgctattttaggtttaatcatttacttttcctccaaattcccattgttctagtgtcatagccatattgaaaaatcgacgctcatgtatgcaactttctaaaaatacttgctttacttgttccaattccttgtcagacattgattcggctaatttattcattaatgcctcaaatacgttaattatgtcatccatttcagtactataaaaatcaaaccattttgccgtatctttttctctattaagcttatgatcactttgagagcgcttagctatttctgcataaatatatggacaaggtgccattgcagcaattgtataaatagcattttcacgactatgcgcttggaaatacatgtgcttaatgtaatggtcgccacttggtggccaaactttagttttaataatttcttcataaggttcaccaacaatttgtgctaaaatatcatgcgctaacacttcaccttctaccataaaatcaatttgctctatcaaaaatttcacatcatccatgttgttcatttttggaattagcaatgcatataagtttgtaaattcttttaaataagctgcatcagcttgtaaatagtgacgtaatgcatcagcttgtatattgcctaataacattttttgaataaagtcatcctcataaatatcattaatgattggctttgcagcttggtacaatttttgtgaaaattccattgtaaaaaatcctccctaaataaaaaaactacttccaacatgaaagtagtttgatggcaatgttgctatactagccccatcacttcaataactactttcctacgttggtactaaccaaatcaggtcataagggtctgaacaattcatctcagccatatcattaggctcccctagtagttccttagtattcaattgcaaattaatcttagcaaacggtttcaacattttcaattattgttgctcagttgggagtgggacagaaatgatattttcgcaaaatttatttcgtcgtcccaccccggcaaggttgactagaattgaaaaaagcttgttacaagcgcattttcgttcagtcaactactgccaatataacttcgtagagcatagaacattgatttatgtcccagcctgtataatgacatatatttgcgaaataaaaaaaccggaacatatcgagaattccccgatatattccaatctaaaagttacttatataactattaattagctatgcataaatggcttatgcagtaacccaatgtccagcgccaccagtgttatataattttactgctgcggcatcttgaacactttcaggagcatttgctggtgatacacctttatatttagcaggtgctactgaatcccaagttgattgtaagaattgatacttaccagctgcacctgatgttggatttacagcatgaatattgccacctgattcacgttgagcaatttgttttagatgagcattcacatttactgatgaaccttctgatgcttttgattcagttggtgttgcagtaacttgtgaattgtttgatgttgatgcttgtggttgttgagtttgagcattttgtggtgcttcaacttcttgtgattgtacttgattagcttgaacagctgatggtgcaacattattagttgcaggtgcttgtgcactcatgtctgctccattagcacctgttgcatggtaattccaagcaaagtgtgtaccatctgattcaaagtgataagtaaacccttcatagtcaaatgtataattataagccccagcttcaattggtttttgatttaatgtttgatcatttgattgcgccatttgcgctaaagatgctttatttaagtccgcttcacttgcatgggcttcgtgacctgcatttcctgctacgattcctaaacctactgctaatgatgatgcgagtaatgttttcttcataatcttaaaatcctcctacaagtaatttgtttctctaaaagttttacagagactactgtaacatctataaaatccgtgcaggttacaacaaaataaaaaaatagccttgttttttacacagtgattacaacgaaatcccccataatttcagatatgattctatcgagaattgtcatgacagtaaaaatgttttttatttgcaattttttatgtaatcgttttgcaatctatgtctattttctattagaaaaactacacaaaaagacgacctacacaacagtactagtcatgtaagtcgtttttaagtgagtatatttcaagttaattagatctataaaaaatttaggatggattaaatgtatattaaggatgtttaggataattggatttaaatttctaataagtcatgattatctatattttgagagtcaatatctaaaatactatctgagagaatttcattattttgggatttaggggacataaattttattgtttcaacatataattcagtgacaaagtgtgtttgtccgtctttatcatactttcttgatctcatttgaccagttataccaaccaatgtaccttgattagtatatttttctatattagaagctaacttgccaaatgctttacagaataagtaatcacagacgatttctccattttcatctttataatttcggtgcgttgcaacacaaaacgttgcaatttttctatcctccttttcaaatatttgtgcgtctttcgtcagtctcccgacaattacgattttatttagcatgtagtgtgtgattcacctcctatgcctatatcttaattactagcttaaaaatggtcaaaatggcaaattttatataattaatagctatagcatctcgttatttgttatatttaaagaaattagtcatgaaatgaccttaaatcttctaaataattcaaaaatcataaatattaaactaatgggatgtgggaatatgaaaacttttaaagcagtaaggtttcaaattgtgaatgaacacggcagaattatagaatatgaattagaagatggcgtaataattaataaagaggaaagtggcacgggttggttgcttgaaattgtcatttctaatgagcattatgaaacatttaaggaatatcaagacaatgaacagttattggatattcgtgtcgtcatcacgcgtccagccaatgatccagctttatttgaatctactgtgaaaagtattaaaaattttaaaacaacaatgtctatcgtatttgaatgtcatatttacactttacgtcaacagtatgctgaaagtttattagaacaacttattgatgatggattatctggtgaagaattaaaaaaatcatttaatcgaatgatgcagtctaaaccaaagttaaaggatgaaaaattagaagagtaaaataaaaaacattcaaagattttgccaacacattaaatctttgaatgtttttttgttttattttacatcttgaattgcaaatgtaagttcacaactacaagcaagttgaccatcgacagtagctttagcattacctttaccgattggtcctttaattttagtgatttctacttccaacgttaaagtatcaccaggtactacttgacgtttaaaacgacatttatcaataccagcaaataaagcgattttacctttattttcttcactatttaaaatagctaccgcacctgtttgagctaacgcttcagtaattaatacgcctggcattaccgcatactcaggaaaatgcccttgaaagaatggttcgtttcctgatacttgtttaatagccacacaacgttgaccttcttcatattcaactactttatcaattaataaaaatggctgtctgtgaggtataatttgtttaatttggttataatcaaaaattgtttccatggttgaaatcctccattatattaatttactgaattaatcgttaatacgttcaatgtctgcacctaattgcttcaatttaccgtgtaagtcaacatagcctctatctaggtgcgttaattcagtaacgcttgttttaccatcagcaactaatccagctaaaattaaggcggctgctgctcttaaatcagtcgctttaacttgtgcaccttgcaattgacttttaccttcaagtttagcactacgaccttctacattgatattagcattcatacgtttgaactctgcaacatgcataaaacggttttcaaaaactgtttcggttacgactttatgaccatttgccgttaataacaatgccatcatttgtgattgcatatcagtcgggaatccaggatgtggtagagttttgatgtctacaggttgtaattccccttcagcacgtacacgaataccatcttcttgatagtccaattcaacgcccatttcttctagtttatagactaaactcgccatatgttctttgattgcaccacgtacaaaaatatcaccacgcgttatagcaccagcgattagtaatgtgcctgcttcaattctatctggaatgatagcatgttctacaccatgtaatgattctacaccattgattgtaattgtgtctgtaccagcaccagtaattctaccacccatttcattaatgtagtttgctaaatcgacaatttcaggttctttagctgcattttcaattaaagtcttacccttagctaatgatgctgccataataatattttgtgttgctcctacacttggaaaatctaaatgaattgatgtaccttttaatccatctttagcattagcataaatattaccattttcaagatgaatttctgcgcctaaagcttcaaaacctttaatgtgttgctcaatcggtctacttccaattgcacaaccaccaggcaatgcaacaatagcatgtcctagtcttgctaaaagaggtcccataactaaaatacttgcacgcattttactaacatattcatatggtgcctcttcatttagagtctttgttgcatcaacgacaacagcattttcgtcctttttgtatgtaacgtcagcatttaaagttgttaatacattatttattgtttctacatcacttaaagctggaacattaactaatttgctcggtttatcagaagctaataaagatgctgtcaatattggtaatactgcatttttagcaccttctactttaacttcacccgttaatttatttccacctttgattactattttatccatcgtaaatcctccacttagaactcctattactttacatttccctattttaaaattattttaagtcattatttaattatatctagttttgattacaaatcatagagttagacttattttattaaatattttacctgcgtcgagtattgtaacaaatctacaataaaattgcttactgcagtgcctaataaaatagcaacaaatatcatacacacttgtaattgagtggcgtatccttttttaaaaaattgatctaatctaattgattgtaaagcccaataggcaatacaaatacatacaacatgtaacactaaatggataactgcatattgtccgatataatccattttatcacctcataagattactgtattacattgtacatgaaaaatttaaataatgatacaaagtttaatacccgtttttagtaaagtttaagctaacttactatataattctttttacataaatatcataactataaagtatcttggtatgaaaaaatgtagctactttcaaaaaatgaaatgtcgactgtagatagtggtgaatgaaattttgattttagcaatctattagtgattgtaaaaaagtaaaactattcttgggagtcggacataaatcaatgtctagactctatagtgttgtatttggcagtagttgacggggccccaacatagagaaattggaaccccaatttctacagacaatgcaagttggggtgaacaacgaaataaattttgtaaaaatatcatttctgtcccactccctcctatttttaatacacattagctgtgtttaatgataaagaaccactacatcataaatctttaatagttctttatcaattccttcccccctctcatgttttgtatctttaaatcaatataattcaaaaaagggtcgaagatatgaaatcacatcttcgaccctttatttactattttaattcagccacacgcaaacggttatttgctctctctaaagctctttcggctctatgaatatcagtattgtcgtcatcattttccaagtgagactctgctcttgctttggctaatttagctctttcaacatcaatttctcttgcagtttctgcagtctgaacaatgattgaaactttatcttttctaacttcaacaaagccatcgcttacagcaatatattcagttccatcgtgaaatttcacttttacaaagcctgtttttaaagcagctacagttggaatatgtccactcatgacacctatctcaccagctgttgtttgcataacaacgagttcaacattatcacgattgtaaacagaaccattaggagtgacaatatctaggtttaatgtattcattatccattcctcctaattgttatacttcaacacccatatctttagcttttgcaataacatcatccatgctaccaactaaacggaaagcatcttctggaatatggtcatatttaccatctaagatatctttaaagtttgcaactgttgtcttaacaggtacataagaacctttttgaccagtaaattgttccgctacgtggaagttttgagataagaagaattgaattctacgtgcgcgttcaactgtttgtttatcttcatcagataattcgtccatacctaagatagcaatgatatcttgtaattcacggtatttttgaagtgttgattgtacatcacgagctacttcataatgttcttgacctacaattgatggttccaatgctcttgatgtagacgctaatggatccacggctggataaatacccatttcagttaatttacgttctaagtttgtagttgcatctaaatgggcaaacgctgtcgcaggcgctgggtcagtatagtcatcggcaggtacgaataccgcttgaatagaagtaactgatccttttgttgtagacgtaatacgttcttgtaattgtcccatttcagtagcaagtgttggttggtaacctactgcagaaggcatacgacctaataatgcagatacctcagaaccagcttgtgtaaatctgaaaatgttatcgatgaataataatacgtcttgaccttgttcgtcacggaaatattcagccattgttaaaccagataatgcaacacgcatacgtgcaccaggtggctcattcatttgcccgaataccatggctgttttcttaattacaccactgtcactcatttcgaagtataaatcgttaccttcacgagtacgttcacctacaccggcgaatacagaaataccaccgtgctcttgagcgatgttgttaattaattcttggattaatactgttttacctacaccggcaccaccgaacaatccgattttaccacctttaatataaggtgctagtaaatctactactttaatacctgtttctaaaatttgaacttctgttgaaagttcatcgaatgctggtgcttgacgatggataggatcgcggcgaacagaatcactaatttcttctttaaggtcaattgtttcacctagtacattaaatacacgacctaatgtttcgtcaccaacaggtacactaatttctttgcctgtatcttttacatccatgcctctttggacaccatcagttgaatccatcgcaattgtacgaacaacgtcgtcacctaattgcagcgcaacttctaatgttagttgtattgtaccttcttctttaggcacatcaataaccaaggcgttattaattttaggaacttcgttatgttcaaatcgaacatcaattacaggacccataacttgagttacacggccaattcccatgctattttcctcctttaaatattattcaagcgctgcggaaccaccaacaatttcagtaatttgttgcgtaatttctgcttgtctcgctctgttatattctaatgataagtcatcaataagttcagttgcattatcagtggcatttttcatcgcagtcatacgtgttgcatgctcacttgcttttgcgtctaatattgttccgtaaatcaaactctcaacatattgaggcaagattacacttaagatagattctttatctggctcaaattcataagaagacaaatgaccatgccccttactagaatcctcttgagataatggtaatacttgtctagatgtaggcttgttttcaagaacgctgacataatgactatagtatatatttaattcatcaatttcttcttcactgtataagtctatagcatggttagctagtgcttgaacagatttgaaagaaggttgatcaggtacgtctacttgagaatactcaatgtcataacctctattttttaggaaatcaacaccttgttgccctaaaactacaatactgtattcgctactatcttgatgtttcgcttcaatatcagtaatcaattttttaagcacgtttgcactatatgcacctgctaaacctttatcactcgtgataactaaatatccacttctagtaattttacgaggtcttagcattggatggtttgtattgctacttgcccctgcaactgcagtaattgcatcttgcattttatccatatatggtgtgaattgttttgtatttttttcagctctacgaagttttgaacttgataccatgttcatcgctttcgtaatctgcttcatttttttggttgattttattcgagtatctatttctttaagagaagccactatctcaccaccttatactaaacttgtttattattcagatttgctaaagctttttttgaattcgttaattgctgtgtcaaacttctcagcatctggtaagccaccagtttctctgatttcatttaacagttcagtagcatttgattctgcccagtggtttaactcgtcttcaaaacgtgtgatatctacaactggaatatcatctaaatatccttttgttaatgcataaataatcaacacttggtgttcaactggtaatggtttgttttgatcttgttttaagacttcaacagtacgtttaccacgttctaatttacttgcagtaaattcatcaaggtctgaaccgaattgtgcaaatgattcaagttctctgtatgacgctaagtcaagacgtaacgtaccagcaactttcttcattgctttaatttgtgcagatccaccaacacgagatacagattgtccggcattaatcgctggtcttacacctgagaagaataaatcagattgtaagaagatttgtccatctgtaattgaaataacgtttgttggtacataagctgaaatatcaccagcttgtgtttcgataattggtaatgcagtaattgaaccgccacctaagtcatcgtttaattttgctgctctttctaataatctactatgtaagtagaatacgtcacctgggtatgcttcacgacctggaggtctacgtaataataatgataactcacgataagctgctgcttgtttagttaaatcatcataaacgattaaaacatgtttaccgttaaacatgaattcttcacccattgttacacctgaatatggtgcaatatataataatggagaaggttcagaagctgatgctgctacaacaatagtgtagtctaaagcgcctgcttgtcttaacttttcaacatttgctcttactgttgaatctttttgaccaatagcaacatagatacaaatcgtaccttgatctttttggttcaaaattgtgtcaattgcaattgttgttttacctgtttgacggtcaccaatgattaactcacgttgacctctaccaattggtactaaagcatcaattgctttgatacctgtttgtaatggctcatctactgatttacgatccattacaccagtagcttttttctctactggacgtgttttagttgtgttaatcggtccttgtccatcaataggttgtcctaatggattaacaactcttccgattagttcttcacctactggcacttccatgatacgaccagtacgtttaacttcgtcaccttcagtaatacctgtatatggtcctaaaataaccacacccacgtttgactcttcaaggttttgggctaaaccaagtacgccgttatggaattctactagctcaccagccataacgtcatttaatccgtgaattaatgcaataccatcaccaatttgtaatacagtacctacatcagttacggacatttctgactcataattttcaatttgtgagcgaagtaatgcactgatttcttcagcttttatggccatctatgtcactcctctttataattaattaactcttctaaattttctttgtaattggacaagatcatttctaacactaccatctaatacagttgtgccgactttaactctaaatccaccaattaaatctggattaatttttgtatctacaataactttagataacttcgtttgttgagttactagtttgacaatcttatctaactcttcttgactcaattcatatgttgactcaattgttgcaaaatcttgattgtagtgtccgttatataagctttggaacgccttgaatacgtcagctattaatgagatatgtctattatctgctaacacgtacatcatatttttaatgtatggattaatgtcagtaaatacaccattaatcaactcacgacgttgttctgctgtttgagttggattactgtcaaccattttcaattgctcaattttatcttttactgcttcatttataactgttaattcttcattaatagtctctaaattatttgtatctaatgacacgtcaaataatgctttagcatacttgttagctacttttaccattatttatcgcctgcctcttttagatacttgtcaaccaatgctttttggtcttgttcagaaatttcttttctaagaactttagaagcaattaacactgatagttcagatacttgattattaatatctgcaatggcacgttctttttggctattgatttcactttgtgctgtttcaatcataccgtttgcacgtacgtttgcttcatgaataatttgttcttgctgttgacgtgcttgaaccttagcatcttctaaaatcttttgaacttcttcttgtgtttctttaagtttttgtttattttcttcttcaagtttctgtgcatttaacttagcttgttctgcgtcatcgatatctctgttaatatctctttcacgtttatccattacatctttcaatggaccccatgcgaactttttaagtaacgcaagtaacacgatgaaagttaggacctgtacaatcacagtaccccactcaacgcctccagctgcaccaagaacgaataagttagctgtttcagtcacgggttcatgacactcctttcattaaaataatcgctagtgttatatagaaaaaaacgacgaggttaggacctactgaatttatgcgataggcatggtgcattcatatctcaactatttaataaagttcaaagatattactatatatgcatcatgaattatgtcctatgcgctttgtcccgacctcttttatctgttaattatccagcaaatgtcatgaatgcaattactacaccgatgataggtaatgcctcaactaaacctacaccaatgaacatgatacccattaattgaccacgtgcttctggttgacgtgctacaccttcaactgttcttgaaacgattaaaccgttaccgatacctgctcctaatgctgataaaccaattgcgattgctgctgcgattaaattcataatttaatttcctcctgtgattgtatataattattgaaatttttagtgttcatctgccactttatgtgacatataaaccatcgaaagcataataaagatatatgcttggattgttcctacaaatattgaaaatgcttgccaaacaattaatcctgggatactaataatccaaccccatgctggttcgttaaagaataagccagcaagtaatgttaatagtatctcacctgcaaatatgttaccgtacaaacgcagaccaagcgttaatgttgaagtgaactcttcgaaaacattaataattgccaatggccaaaacggctgtacataacctttaagatattgtttcgtaccacgcatttttattccataaaagtgagttaacagtattatcgttgtagacaacgttaaagtcactgttgcatcagctgttggtgatttccaccacaatgtgtgatctttcgttactatagaaaacggaagacctaacatattagctataaaaatgtacagaatcagcgttactgctaagaagtggaattgaccaccttttttccaagccatgttaccttcaatgattcccctcacgaaatcaaaaatccattcaacgaaattttgtttgccagttggtctttttttcaaattacgcgtacaaatgatagcaagtagaaaaacaagaaacgccgtaacaagtatcatcaatatacttgataaattgaaaacgatatcaaaaccgaataaattccaactcacgagcggggatttgtgatccataatctcacctctttcttaatttatttgctcacctttagtaaaggacgtatgataactacaacatatgaaatcattaaaccaataattataccgatgatacttacatgcgctttattaaggtaccaaatcatacaggcaataattgcaactaagtatcgccacatatttccagttgaaatatgcatagtgtctggtcttttagctttagctaaatagcattcaaaaatacatgtgttgattgcagaaccagtaacaccaatgattaatcctaagataaatgcatggtgtgtataaaggtataatcctcccaatattattattagataaaaataatattgaatgaactgtttaaaaatgttgtagaaacgactcattttatatgcctccgtgtgactgatatcaatcatgaaaaccgttccactcatacaaactaaatgataatataggcgatttgtggtgtcaattctattcaaattgttgtaaaaaaataagcatagttagacacaatttagacacaattagacaaaaagtctattttcctcagaaatcgcttggtttttcagtgattaaattcaaataatacttaatatgattaactattctttctgaagcaaatccatcaccgtaaggattagatgcttcagacatttgatgatataatctctcatcatcgattaattcttttgcagcttgatacacattttgcttatttgttccaatgacttttaatgtgccagcttcaacaccttcaggacgttctgtaacgcttcgcaaaactaaaactggcttattaaatgatggcgcttcttcctgaattccacctgaatctgtcaaaataaaataagattttttagcaaaattatggaaatctactacgtccaaaggttcaatcaattcaattctgtcatgactacctaaaatcttttgagccacctctcgaactttcgggtttttatgcattggatataccagtgctaaatcagtatactcatctattaagcgtctaaccgctttaaatatattttccatgggtttcccgatattttctcgtcggtgtgctgtcataagaatgaattttttgtcatggtatttatccatgatgttagatttataattgtcatcaactgtatatttcatagcatcaatcgctgtattaccagtgacaacaacactttctgaatatttcccttcacttaacaaatgcgatgcagcatttttagtaggtgcaaaatgtaagtcagctaatacaccaactaattgtctattcacctcttctggaaaaggtgaatatttatcataacttctaagccctgcttcaacgtgtccaatcggcacttggttataaaatgccgctaaaccacctgcaaatgtcgtcatcgtatcaccatgtacaagtaccatgtctggtttttctaattgaatcacttgctctaattgagtgattgatttagaagttatctcagaaagtgtctgtcctgatttcataatattcaaatcgtattttggtttgatttcaaaggtacttaatactgaatcaagcatttctctatgctgtgctgtaacaacaacaattggctcgagcattttttcttgttccaaagctttaactaaaggagccatctttatggcttcgggtcttgttccaaatatggtcataatctttttcatcaaactacttatctccgattcttctatttagtaccaaacaatctatctccagcgtcgcctaaccctggtgtgatatatgctttatcatttagcttttcatcaagtgcagcaatataaatatctacatctggatgtgcttcatgcatcttttctacgccttctggtgctgcaattaaacacatgaagcgaatatttttagcgccacgtttcttcaatgaagtaatagcttcaattgctgatgcgcctgttgctaacataggatcaacaacaatgatttgtctttcagtaatatcttgaggtaacttagcaaaatactctacagcctttaatgtttcgggatctcgatacaaaccgatatgtccaactctggctgcaggcactaaacttaaaataccatcagtcatacctaaaccagctcttaaaattggaacgatagctaattttttaccagctaatcgtttagccgtcattttagttacaggcgtttcaatatcaacatcctgaagctctaagtctctagttacttcatatgccatcaacataccaacttcgtctacaagttctctaaattctttagtacctgtatttacatctctaatatagcttagtttgtgttgaattaatggatgatcgaaaacgtgtactttactcataaaaattactcctatctttgtgtatgtttattgatatagaggatattcagctgttaatttcgcaacgcgttctttagcttgttgtaatttttcttcatctttactatttttcaatgctaaactgatgatttttgcaacttcctcaaaagctttttcatcaaatccacgcgttgttgcagcaggtgtacctaaacgtataccactcgttacaaaaggtttttcttgatcgaacggaatggtatttttgttacatgtgataccaactgaatctaaagtctcttcagcttctttaccagtaagtcctatagacccttttacatcaacagctactaagtgattatctgtaccgccagaaacaattctaaatccttcattaattaatgcttctgccagaacttttgcgtttttaaccacttgttgttgatacgttttgaaattattttctaacgcttctccaaaagcaactgcttttgctgcaataacatgctcaagaggtccaccttgaataccagggaaaattgttttatctatgtcttttttatattcttccttacataaaatcatacccccacgtggtccgcgtaatgttttgtgtgttgtagttgttacaaaatcagcatattctactggatttggatgtaaacctgccgctactaatcctgcaatatgtgccatgtctaccattaacttagcgtttacttcatctgcgatttctttaaactttttgaagtcaattgttcttgaatatgctgatgctcctgccacaataagcttaggcttatgctctaacgctaatttacgaacttcatcataattgattcgttctgtgtctttatctactccatattcaacgaaattgtagaatttaccactaaaattaacaggcgctccatgtgtcaagtgaccaccatgactcaaattcatacctaaaactgtgtcgcccatttctaatgcaactaagtaaacagccatgttcgcttgtgaacctgaatgtggttgaacattgacatgttcagctccaaacaatgctttagcacgatcaattgcgatgctttcagtaacatctacaaactcacagccaccataatatcggcgtcctggatagccttcagcatacttattagtcaacactgaaccttgtgcttccataaccgcttccgatacaaaattttccgatgcgattaactctatgttgctattttgtctctgaaattctctctcgattgcttctgcgataactttatcttgcttggtgatataagacataaaatctccccttctttcaaaaaaacttattggtatttagcacgttcgccaccaatctttttcggcctagatgtggcaatagttacaattgcctgtcctacttgctttactgaagtccttacaggtacacatacatgtttaatatgcatgcctattaacgtttgaccaatatcaattccacaaggaacagtaatatgttcgaccacgatcggatccttcatatgctgaaaagcgtatgttgccaaactccctccagcatggacatctggaacgacggaaacttcttccattgttaatggattatactgagatttttctattgttatcgctctgttgatatgttcacatccttgaaaagcaaaagtaacgcctgtctctttactcacaacatctaatgcattaaaaatagtttctgcaacttccatcgaaccgacagtccctattttttcgccaatgacttccgatgttgaacatccaattaaacatatatctcctttattaaaaaaggacatatcttttaattcgtctaataacattgtcaaatctttcataaaagcccacccttcctaaaaataaaaaaggaatatagcaaagtgctacactcctctattataacttatttaactgttaacatatactaattatacagaattcctactagcaaataatatcttttaattttaaaattaaacttacaagttcttcataggtatgtacatacatttcttttgttccaccgtatggatctataacttctcctgcttcttttacatattcatgcaatgtgaaaacatgattttgcaaaccaaagtgtgcctctattaattctttgtgcgaatacgacatcgtcaaaataatatctgctttcaaatctgcttcagtaaattgttgcgataaggtcgtttcagctaaatgatgttcttcaactaagtcttcaacataattcgaaacaccttgattgttcacagcgaatatacctcttgattcaaattgatgatttggcataacctcttttgcaatactttccgctaatgggctacgacatgtgttacctgtacaaacgaataaaatcttcatagttcacatcctttaataatgtgattacctgcagcttttaacatgcgattcataattgcttctgtattatcattcagctcaaagccgtatatatacgccgctgaaatattttcattttcatcaagtgaatgtaacacatcataaagattatgacttgcttgtttaacatcattgtcatcctgacataattgaatgaattgcgcttcacttggtataaacgccaccttattactcggcacaataaaagctatagaagaccaatctttaccgtcatttccaattttgctctcaatatctgtaataattgtaagtggtgtattgggtgagtaatgcttatacttcatacctggtgcaattggctgttcagtatcattataatcagcatgggcgatactattcggaagtatttctgtaatcattgctgctgttatagaaccaggtcttgcaattttataaggaaaagatgtgcaatctaaaaccgtactttctaatccttcttcactttgttcagcttgaacaataccatcgatacggccattcaaatcttgatatacatgattgaaagttgttggtgaaggtctaccacttaaattagcacttggagcagctagaggttcatttatgatttgtaataattgtctacctacagaatggcttggcattctaacagcaactgatgataaacctccagaaacttttcgacatagatagcctggctttaacggcaatataaacgaaatagggcccggccagaatgcctgcattaacttttctacgcgtggatccaaagtatatgtaaaatcttttaattgacctttactgtgtatatgaacaataagcggattgtcagatggacggcctttagcttcatatattttagctacagcttcttcatctgtcgcatttgctgcaagtccataaactgtttcagttggtaaacctattaaaccaccgtttaaaacaatgtcttttatttcattaattttaggatattgctgtaaatcttcattatattctctaacatcccaaattttagtatccaacttaatcacgcctttcttatttatcataatataaagcaaaaagctatgcacttaactaatcatagcaaaggcataacttctaattaccatttaaatgagacgattcgatcgtggccatttatatctttaataatgtcgatttttttgtcaggaaatttatttaaaattattgatttaagtgcctcaccttgattgtaaccaatttcaaaaacaactgggctgcctttttccataacgtgaggtaaatcttcaatgattgattcataaatagcatatccatggttatctgcaaacaatgcctgatgtggttcgaatctcgtaaccgttggagacatcgtaaccatatctttttcatctatatatggtggattagatatcaagccgttcaacttgataccttcattaattaagggctttaatgcatcccctgttaaaaattgtatttgtgattgatgcttctcagcattattacgagccatattcattgcttcaagtgaaatatcagtagcaataacatttaaatccggcttttcacatttcaaagtaattgcaagtacaccactacccgttccgatatctacgattgttgcatcatcttctaactgttgtaagaaatgcaacattacttcttcagtttcaggtcttggtatcaaacaatttgagtttacatcaaacgttctaccataaaatgaggcaaagccaactatatactgtataggctctcctaataacatacgttgtaatgctaagtcgaacttcataatcatcgctttcggcatatcatcatgcatgtggactacaaagtccgtacgcgtccattgaaatacatctaacattaaccattcagctcgtgtttgttcaaaccctttttgttgtgttaaatgaattgcttcatctaacttttctttataattcaccattattaagttctttcaatttatctgtctgctctgataaagtcagtgcatctataatttcttctaaatggccttccataatttgccctaatttttgaagcgttagacctatacgatggtctgttacacggctttgtggataattataagttcgaatacgttctgaacgatcaccagtaccgactgctgatttacgttgtgacgcatacttttgttgttcttcttgaactttcatatcgtataaacgtgcttttaacactttcattgctttttcacggttttgaatttgagacttctcagaagatgttgcaatgacaccagttggtaaatgggtaatacgtactgcagagtcagttgtgtttacgtgctgaccacctgcaccacttgaacgatacgtgtcgatttttaaatcttcatttctaatttcaatttctacatcttcaacttctggtaaaactgccactgtagctgttgaagtatgaatacgtccacctgattctgtttcaggcacacgttgaacgcggtgcgcaccattttcaaatttcaatttactatacgcgccattaccagaaactgagaaactaatttctttgtaaccaccatggtcactttcagacgcttctactatttcagttttgaatccttgtgattcagcatactttgaatacatacgcattaaatcaccagcaaaaatcgcagcctcatcaccacctgctgctgctcttatttctacaataacgtctttgtcatcattaggatctttaggaatcaataatattttaagctcttcttcaagatttggaagttcagctttaataccattactctcctcttttaacatttctacttcttctttatcatcagtctcacttaacatttcttcaatatcagctaattcttcttttttagctttatagttacgataaacatctacagttttttgtaaatcagcttgctctttagaatatttacgtaatttatctgaatcatttacaacatctgggtcacttaacagttcatttaactgttcgtatctttcttctacaatatctaattgatcaaacacttataattcctccttattattatcactaggtgctacgatatggtgcgcgcgacaacgtggctcataactttcattggcacctactaagataatcggatcatcgattttagctggtttaccatttattaatcgttgcgttctactagatgaagaaccacaaacagcacaaactgcttgaagtttcgttacttgttcactgacagccatcaatttaggcattggttcgaacggttcgcccctaaaatccatatctaatccagcaacaataacacggtgtccatctgctgatagtttttctactatacttacaatttcatcgtcaaaaaattgcacttcgtctattcctataacatcaacattagttaagtcgtgcgtcataatttcacttgctttagaaatattaatcgcttcaatggcattaccattatgagagaccactttttctttatgatatcgatcatcaatcgccggtttaaatacaacgactttttgtttagcgtatataccccttctcagacgtcttattagttcttcggatttaccgctaaacatactacctgtaatacattctatccaaccggaatggtaagtttcatacattgagagttccacctttttcaaaacataatcgctttattatatcatatttcaaatattcataaatgtctttttcataattatatcgatattgtacatgaacaattattttataaatttgtcttgcatatttatatacagctattctaatttgttgcttcttattcgtgcggtgtttctactcaatacaaactttaataaaggggggaatttatcattatgtattaacaacatggtattgagtcacttctttgaacacagtcgtaagtatatacccttactacgcttataaataaaaaagctgtctacaattccattataggatgcagacagcttaacgattactatattagttgtttgatttaagaccaaactttttgttgaaacgttccacacgtccatccgcagcagcgaatttttgacgtccagtgtagaatggatgtgaatcagatgaaatatctaaacgaataactgggtattcttttccatcttcccactccatcatttctgaagatgtttttgtagaaccgcttaagaatttgaagtttgtagtagtatctaaaaagattacttggtgatactcaggatgaattccttgtttcattattttcagctcctttgccctgaaccatctggaacagagttatttgtgagtttttacccaatactgtgtaattataaaggtaattaattcaaaacgcaagcccctatataatgtttattaaattataggtcgacccgttttagtactttcttctgcagacttttgtagctgcttgaagaaatcttcattattcttagaccttttaagtttgcgaataaatctttcagtaaagtcagttgagtcagtgaatagatttcttaattgccataatgtgtctaattcagatttacttatcaacaattcttctttacgcgttgaacttctgccaatatcaattgcagggaagatacgacgttcagacaatttacgatctaaatgtaactccatgttacctgttcctttaaattcttcgtaaatcatatcgtccatacgtgaacccgtatcaactaatgcagttgcaagtattgttaaacttccacccgcttcaatatttctcgctgcaccgaagaatgcttttggtttgtgtaaagatgcaggatctaaaccacctgataatgtacgaccacttggtggaataactaagttataagcgcgtgctaatctcgttatagaatccattaaaataatgacatcttccccaatttctactaaacgctttgcacgttcaagtaataattcagctactttaacatggtgttctggtggttcgtcaaacgttgaatgaacgacttcagcagcttctactgagcgttctaaatctgttacctcttcaggacgctcgccaactaacaaaataaatagctttgcatctggtttgttcgtactgattgcattcgctatttcttttaataacgatgttttacctgctttaggtggcgccactattaaaccacgttgacctaaaccaatcggtgttactaaatccatgatgcgcgttgaataattttgtgtttctgtctctaatttaatacgctcatctggataaagtggtgtcaaagcttggaaatgcggacgtttcttcacttcttctgcgttatggtcattgacaaagtcaacttgtaataagccataatatttttcgttatctttaggttttctaactttcccagttactttatccccacgtttaatttcaaaacgacgaatttggctagcagatatataaatatctttttcccctttagaatagttcactgttcttaaaaaaccataaccatctggttgtatatcatctaagataccttccatataatagttaccatctttttccatttgtgcttccataatagctagaacaagttcttttttatttaatttactatagttcgtcaacttaagagttttagctttttgagtgagttccttggtagtatagttcttgtacaattcgtggaatgattcatactgaggagatgtacgttctctttcaggcatatagtttacacccatttcattattttttagttagtaagtaatagataggcatgacaatgcataaataactgtgctagcacaatcccattatgctaatccccaaccttttaaatacatgaataactatagcaaatttttattttaattacaaaatctatttataaaaattgcaaaattaaaacagtacacaaaacttaattagtcatgtgcactgttttattgcgatttttaattcaaaaatcaaatttatttaaaatatccagctatagatttcacttctaagaactcttcaataccataatcgccccattcacgacctaaaccagattgtttatagccaccaaatggtaaatctggctttctacctgcttcgtttatttctactgtacctgcttcaatagaacgagctactttatgcaatgtttctttgtccttaccaataacatatcctgccaaaccatattttgtatcatttgcaatttgaatcgcttcatctaaatcgttataagtgataactgacattactggcccaaaaatttcttcttgtgctatcgtcatttgattatctacattaataaaaattgtcggacgtgcaaagtatcctttttcaagtccttctggtttaccaggaccaccataaaataattcagcaccttcttcaatacctttattaatataattttgtacttgatcaaattgttttttactaatgatagggcctacttgtgtaccatcttctcttggattaccgacacgcacttggctaaattgttcttttaattcagctaagaatgcatctttaattttgtttggcactaaaacacgtgtaccagctgtacatacttgaccagtattattaacaactttgcctgttgttgctttagccgcttctttaatatctacgtcatctaggacgatatatggtgatttgccaccaagctctaatgatacctttttaaaatctttagcggctttttccataattttagaaccagtagggcctgatcctgtaaatgacatcatgcgtactttaggatgttcagataaaggattcccaacaccagcaccatcaccattaacaaggttaaatacacctttaggaacaccgactttatcaaaaatctcagctaaaataacagctgcaaatggtgtttcttcagatggtttaagtacaactggactaccagccgcaaatgctgctgctaattttaatgatgtttggtttgtagggaagttccacggtgtaattaatccagatacaccgattgcttctttaacaactaaatcatctccgcggcgttcttcaaattcgtagttatctaatgcgtctctcgctgcaacaaaatggtttagtcccatttgataatggacacgctcagataatgataaaggagcacctaattcatccgtaatagcttgtacaatatcgtcttttctgttttcatattcttttacaattttatctaataacgcttgtctttctttcacagatgtatgacggaactctaaataaacatcgtctgccgcctcgacggctttatcaacatcagctttattacctttagcaactttcccgattacttcttcggttgctggatttataacttctatcgtttcattactattactttctacccattcgccattaatgtattgctttgtgtagtctctcattattctttcactcctcaagaatgatttatatattatttatccgaaatgcatacgatataaacattacattccattatgatacgctcccttttaatatgttcaaaataaaatgctttaaaattttgctgcatctatttttttatatttttaaataaaaataactattcccacatcatcgcaaataatgcgaagacttagaaatagttataatcaatgctatgtttaaacgtcatgtaattatttagcagtacgttgatctgttaaatcgacatatgattgcgcccatgcttcaattggatgtaaagcctctgctaacgctttacctttttcagttagcacataaataatttgtactggactcgtagaaatgatttgcttctcaactaactcccattgtgcaagctctgacaacttaagacttaaagcacgtggtgttattgttttcaaatctcttttcatatcggaaaagtgtgctgaacagtcattacatcttgagagataattaatgattaatccattccaacttctaccaagtattttaaaagtttcttcgagatacggacatacttccatcatcttcacctctcatcaataaatttagaatgtaaacgaacacccttttttaatcagtataattattataccacaaaacaagataaatctatacagtttccgtccaaatatctgcacctaaagcttttaagtgttctacaatatctgtataacctctataaatatgctttacattgtaaattgtagttacaccctcagcaattaaaccagcaataattaaacaagctcctgctcttaaatcgctagcataaacttcagcaccatgtaatgttgatggttttatcgttgctgtgccttcgtcaacttcaatatttgcacccatgcgctttaattcttcaacatgtttaaaacgctctggataaatcgtatcagttacaaatgaaggaccatttgccataaataataatggtgtaataggctgttgcaaatcagtagcaaaacctggatatactagtgttttaatatcaacaaattgatatggtgcattattattgatgcgaattctttcgtctcttacatcgacattcacacctaattcactaaatttagcagttaatgtttctacatgtttcggaacaatattatttaatataacattttctccacatgctgcagcgatacacatatatgtgcctgcttcaattctatcaggtataacttgatactcagaaccatgtaattctttgacgccattgattttaattgttgatgtacccgctcccttaatattagctcccatacttgttaagaagttagcaacatcaactacttccggttctttagcagcattttcaattacagtttgtcctgttgcataaactgcagctagcataatgttaattgttgcacctacgctaaccatatctagaaaaatatgcgcaccttttaactctttagcttcaattttcattgatgtcgtacttgattcatcaatttcagcacctaaagctttaaatcctttaatatgttgatcaattggacgtggcccaagtggacatcctcccggtaaaccaatcacacattttttaaatctacctaacatggcacccatcatatagtatgaagcacgtaatgattcaactttattatttggtaatgcagcattttgtatttcagttgtatcaacttctaattccgtaccatttagtgatgccttaatatttaaatcttctaataaactcactaaagttttaacatcagagatttgcggtaacccttctaatttcacatgtccttgagctaataatgttgcaggaatgatagctacagcactgtttttcgcgccactgatattaacttccccatttagtgtgcgtccacctcttatttttattacctcttgagccatatcatttatctcctttgtccattactttttaattttttgcattattagcattataaattaattttactttatttgtaaaatagtttattttaatcgttaaaatcttgtctttctattttcgattgattaataacaaatcattcacctttactaatatatgctgttcttccccacttgaccatggtctaaagtctgattattcaactaaatattgacgttgttttgataattatttagttttaattctacgatttgtacgtaaacttttttcataaattgctcattttccttataattatatcacaatcaattttggtatattttaccatttttacgctttcattttaaaatcaaactgttttatttattacttatacgacataaaaaagaagcaaacaccattttgtctgcttcttttaaaattaatatccctacgttattaataacttaaagactaaatattaattatttagcgcggtttgaagtaccgaactctttaattttacctttaactgtttctttgatagcttcacgtgcaggtcctaagtatttacgaggatcgtaaacttctttgtcgttatttaaaacgtcacgaactgcttttgctgaagcgatttggttttcagtgtttacgttaattttagctgtaccaaatggaattgctttttggatatctttagtcgggataccagtaccaccgtgtaatactaatggtaaacctgtagataaaccgatttcttccatttctttaaatcctaattttggttcacctttgtatggaccatgaactgaacctaatgctggcgctaatgcatcaataccagttttttcaactagttcttgacattctttaggatcagcataaatgatgccgtctgctacaacatcatcttcttgtccaccaacagtacctaattcagcttctacagaaacacctttttcatgagcgtattcaacaacttttttagttgttgctacgttttcttcgaatgggctgtgtgaagcatcgatcattactgatgtgaaaccagcatcgatagcttctttacatttttcaaagcttgaaccatggtctaaatggattgctacaggaatagtgatgtttaagtcatgcattaacccttcaaccattttaacaattgtgtagaaaccgctcatgtaacgagcagcaccttcagaaacacctaaaattacaggtgcattttcttcttgtgacgcttctaaaattgcttgagtgaattctaggttattaatattgtattgacctaccgcataaccattttcttttgcatcaattaacatttctttcattgaaactaaaggcatgaaagttcctccttgagtgcttacgcacgtatttttcaaagtaattatatcaaaaaaatagcgtcaatgcattgaaatactgcagattaaatgtgtattttttgaaaaatgcgatagttatactaaatgcaaacgtatacatttttatacaatttaagccgttgcataatatgtagtcattaattacaatattttataagtagattggaggataaagatgtcaaaaatcttaaacacacaactaataggtatctttaataggctagaaaaacaatctttagaaattcaaatggccgcccaatgtttaattcaagcaattggtggcgaaggttatgtttatgtaaaaggttatgatgatttacagtttttcgaaagtttcattctacatagtgatgagcgtttaaaatctagccgaaaacttgacgctattaaagactttaaagaaattgactcaactgatcgtgtattattattcgcaccattttataatgatcaagttgcattagatattcaaaaacttatcgacttagatatcgatgtggtcttaataagcaacaaacctaaaacagatgatttccctgatcatctcgtacattttatcgatttatctacaccaagacctatagtatacaccgaagattacgataagattgtccaaccacatgcgatggcattgaattatgtatactatgacatttatacacaaatgattgaaatgacaagagacttagaattataaaagtcactattgttatttcataccttgtcactaacataatattaaaattatacgaaaacaggctgggacataaatccctaaaaaacagcagtaagataattttcaattagaaaatatcttactgctgttctctatttatacaatacttcgtattgaatggcttcgctttcctagggtgccgtctcagcctcggtcttcgactggcactgctccctcaggagtctcgccattaatactacgtattaacatgtaattttactttgaaatacttttaaaaataagagactttgcccaacttgcacataaatgtaaaattcaataaaatgaattttctgtgttgggtcccttcgtataatttaataaataccaataaactaaattaacgaggtgccttaagtataaaaattataacatgatacaacttacactaccaatagaaacttctgttagaatctctcaaaatgatatttcacgatatgttaatgaaattgttgaaacgatacctgatagcgaattcgatgaattcagacatcatcgtggcgcaacatcctatcatccaaaaatgatgttaaaaatcatcttatatgcatatactcaatctgtattttctggtcgtagaatagagaaattacttcatgacagtattcgaatgatgtggttagctcaaaatcaaacaccttcttataaaactattaatcgttttagagtaaatcctaatactgatgcattaattgaatctttatttatccagtttcatagtcaatgtttaaagtaaaatcttattgatgataattcaatttttattgatggtacaaaagtagaagctaatgccaataggtatacatttgtgtggaagaaaagtattcaaaatcacgaatcgaaattgaacgaaaattcaaaagcattatatcgtgacttagttgaagaaaaaataataccagagataaaagaagatggagatagcgatttaacaatagaagaaatagatttaattggtagtcatttagataaagaaatcgaagatttaaatcattctattgagaacgaagattgtgctcaaattagaaaacagacccgtaaaaaaagaactgagattaagaagttcaaaaagaaatttgatgattattccgaaagaaaaaataaatatgaagaacaaaaatcgattcttaaagatagaaatagtttttctaaaactgatcatgatgcaacttttatgagaatgaaggaagaccatatgaaaaatggccaacttaagccaggatacaatttacaaatagcgacaaattctcaatttgttttatcctatgacctatttcaaaaccaaacagatactagaacattaatcccatttttaacaatgattcaaaataccttcggttatttaccagagtatattgtagctgatgcaggttatggtagtgagcaaaactatatggctattatagatgattttaataaaacgccacttattacgtatggcatgtttattaaagataaaactagaaagtttaaaagtgacatttttaacactcaaaattggaaatatgacgaacttaatgatgaatttatatgtcctaataacaaaagaataggttttaaaagatatgcataccgtaatgatagatatggttttaaacgtgacttcaagctatatgaatgcgatgactgttcatcatgttctttgagacatcaatgcatgaagccaaattcgaaatccaataagaaaatcatgaagaattataattgggaatactttaaagcccaaattaatcaaaagctttctgaaccagaaacgaaaaaatctatagtcaaagaaaaattgatgtagcgcctgtttttggatttatgaaggctattttgggtttcactcgaatgtcagttcgaggaataaataaagttaaacgagagctaggttttgtattaatggcacttaatataaggaaaatagcagctcaacgagctgtacattataaaatacatatcaaaaaagctgatttctatcaaataattaatagaaatcagcttttttacattgcctaagaacttaatgtcccaagccctttattagcaaatttatttattttgttgatattttaatgaagcttcaataaatgatttaaaaatcgggtgcggacgatttggtctagataagaattctgggtggaattgacaagcaataaagaaatcatttgtcggaatctctaccatttctactaaacgtccatctggacttgtaccagaaattaccataccatttgcttctaattgttctctatagtcattattaaattcataacgatgacgatgtctttcttcaatttccgctttaccataaacatcttgtgccaatgtgccttctttaattgaacatggatataagcctaagcgtaatgtaccacctaaatcttcgatatctttttgttctggtaataaatctataattgggtatggtgttgctgggtctaattcagctgaatgtgcgccttcaaggcctaatacgtttcttgaaaattcaactgttgcaagttgcattcctaaacaaataccaaagaatggtacattgttttctctagcatacttaattgcactaattttaccttcacttgcacggaaaccaaatccacctggtactaaaataccgtcgacatctgcaaggtattcggctgcattttcatctgttacttcacttgaatcaatccatctaatgtcaatatctttggcaaaaggatatccagcatgtttcaatgattcaacaactgataaatatgcatcttgtaagctaacatatttacctactaaaccaattgtaattttaccatctaaattattaacgatatctaacaactgtttccattcatcaagctgtgtttcatatttcgcgtttaattgtaaacgtttaataacgatatcatccatattttgttggcttaattgtaatggaatttcgtataaagagtctgcatcacgacattcaataacactttctttattaatgtcacagaataatgcaattttatcttttaaatcttgtgtcatttcatattcagttcttacaacgattaagtctggttgaatacctaagcctcgtaattctttaacactatgttgtgttggcttcgttttcatttctccagcagctttaatataaggcagtaatgtacagtgaacatacataacattttctctacctaaatcgctacgaatttgacgaatcgcttcaataaacggtaatgactcaatatcacctgttgtaccgccaatttcagtgataacaacgtctgcattcgtactttcccctgcaagtagtaaacgttctttaatttcatttgtaatatgcggaataacttgaactgttccacctaagtaatcaccacgacgttcttttttcaatacgtgtgaatacactttaccggctgtcacatttgaaaacttgtttaaattaatatcaataaatctttcgtaatgtcctaagtctaggtctgtttctgcaccatcatccgttacgaatacttcaccatgttgataaggactcattgtacctgggtcaacatttaagtatggatcgaatttttgaattgttacatttagacctctatcttttaataatctacctagagaagatgctgtaatacccttccctaatgatgaaactacgccacctgttacaaaaataaattttgtcatgtcttgacctcctaattattaaagggaatgcttcctcatcaattgtaaaaatcacgtaaaacataacattaaagcaagctcattcaagttgtttatttgtcgaattcgacaaaattaaattctgtttacttaccgtttccatactgctatgtcactatgtatatcatttacaactttgatttttgcgttatcatttcttgatttactcaattaaataaaaaaacgctccctctcacaaattctgtaaggggagcgtataaattttatacacgtgtcctatttaaaggagcccgaataaaattttatcatctttcaactaaaagtcaaacaaaaaattaatcgttgaagtcttcttcgtcttcaaacacttcttcgtcttcgtctagttcatcttcatcttcttcaatgactatatccgaatgattgatttcttcttcaacctgctcatcttctggatcatttagttcttcttgatcatctgtttgagctggaatatcatcgtcgtcatccatttcatcttcgcccaataattttaagttttgatcttcttcatcatctgcatccagaatatcgaatttttgaatagttggtgcgattttctcttcaatatcatctaccgaataccaatcacgtaatccccataaattttctccaacatttaaaaaacgaccatctgtgtttaaatccgtgtaaaattgtacaacacgattttcaatttcttcgtactcataatcacctaacgctctaaattcatcgatgatatcatataagttcattgtttcgcctttatcattcaataatgtataagccatatcaataaatgatttttcatcaaccatttgttttgtataatcttgaattttcattgcccaatacttcctttcgaaggatataatctaaatttatacgtctgaattcatttatatatagtaacaaaactaaattataaatgacaatatcatatttcgcaatcactgttagtaatttaaatatttttcgaaaacgacataatcatcagtttgttcgatttcaacgaaattactatttaaacataatggtttaaaatcattattctctccaaacagaatcatcgtaatcacattaaggttgtcatagttttttcttaagtaagttggcaattgtcgcagagcacttgaaccaataccattaaagcgatatgatttatccacttcaatagcagcaatgttcatgcgttcaccaatctgctccaatgcgataaagccaaccttttggccatcaatcattaaattaatgatatgtacattggtcacttctgaacgactttcttcttcaagctttaatgacgaaacatgttttgaatctaagtccaagtaatatagtcgttctttgccaattggtccttcttctttagtcgctgtatgcatgaatccagcacgttcgtataggttccaagcattgtcattttccgcatctactactagatatagatgattaaaatcaggaaatacaccttgaacatattgcggcaatgacatcattattttcgtgccatatccaaaaccttgatatttttcattaatcgataatgaacgaatataaacgacattttcaggtgtatcataaccttcatgctgatagtaacgatgtaatacaaaaaagcccaccacttcatttttatcgtttattgctacgttagcaatcctatcagcatcattaattgcatcatcaataacttctttaggtaaagatgaatatatttgttgtctttcattcaagtcaaaatcattaattgctgaacgatattgttcatcaaatgcttttaaagtgataccttcaaaacaaagttctttagccatatatttaacccctatctttttatatatgaagcatgaatccccatattattttacctattatttcactacgataccattatttgctctaagttaaataaattacttatttatattttttaaatttcaaaattaatgtactattcctcattacttatcattttaatcagagagttacaaatacactgcgtacgaactacttttaatattgcgtcactaactaacaatcctatacaacttcaaaattcctagaaaataatatatataacttaacgtctacgtttgtaatacattaattgcgatacgcttacaatgttgaaatacaatggcatcaaatttgttaataattactattattacttgttttttagtcattttactatactattatttaaggatagacattaataatgaggtgggaatcttatgaaagttggcattgacgctggcggtacactaattaaaatcgttcaagagcaagataaccaacgtacttttaaaactgaattaactaaaaatattgatcaagttgtggaatggttaaaccaacagcaaattgaaaaattatgcttaactggaggtaatgcaggtgtcattgctgaaaacatcaacattcctgcacaaatttttgtagagtttgatgctgcatctcaaggactaggtattttgttaaaagagcaaggccatgacttagcagattatatttttgcaaatgttggtaccggtacgtcactacattatttcgacggccaatcacaacgtcgtgtaggcggtatcggtacaggtggaggcatgattcaaggactcggttatttactaagtcaaatcactgattataaacagttaactgacatggcacaacacggtgatcgtaacactatcgatttaaaggttagacatatttataaagataccgaaccacccattcccggtgatttaacagcagctaattttggtcatgtactacatcatttagatgctgattttacacctagcaataaattagcagccgttattggtgtcgttggcgaagttgttacgacaatggccattactgttgcacgtgaatttaaaactgaaaatatcgtttatatcggttcttcatttcataataacgctttattacgcaaagttgtggaagattatactgtgttacgcggttgcaaaccgtactatgttgaaaacggcgcattttcaggtgctattggtgcattatatttagaaaaatagaaaaagaccatttatatgcgcgttgttttaaataaacgctatataaatggccttttattttatggtctacgtgttttggaatacgtattgttccatttattatcacttaattacttacaactcaattcaattaaaatgtaagttcattagacaatttttgcgctgaaacaattgtaccaaccacgccagtttttaaatctatcgcaacggctttatgatcatctctaagttcatctagccattctccgaaaacagaaccttcaatcgtaattaaatcacactcttcaaaatcttcatctcgaacttttaacgctctgtttttaatactccatacaggcataatatgcggctttttttcgtcgctatcattttcactaatgagaataaactgcttactaccttttttagttaagccgtatacttcatcatatttcgctacatcttggacaaattctttgattctaattttatctaattccgtcatcacttcttgtgtaacagctacaacgtttagtagatgcccttcttcttccattgtttgattcataataatatggtcttgttcatcaaacaattcatctaattcataagtagcaaaacgatcaacgtccatttttacaactttatcaaatggaatatcacgacttgttaaaaatgatacggccacactttcttctgtccaaacgcctacatacgcttcacttttataatttaggcgtactagttttttatttttagaggcgaaataaatacattcatttattaatatatctctaaagaatggatatgctttataagacatgcttgaccctcactttttaaaatatgtcatacataaaatagtaaatgactccaacaagttagtcaattagacatattatgaattcaatttaatgtcatgtttttcattttaaaaattcaatagcattaaattttacgtatacacaaattcggtctataacacgaaacatatctagttactaaaaatttcaaaacgataacctttagtatacctttatcaacaaaatggcaactcttataacatagtgaaataaaagtcgccatttaatattagtattacaaagtattgccatatcataaatttaattactgttgactagaatcgaaaaaagcttgttacaaacgcatattcagtcaactactggcaacacaacattgtagcgccttatgttccgaactctaatagtgttcaagttcagctaaaaatgcgcgttcattctccagtactgtttcttttgaatcaccatgccaaatacagccaaaccttgatttaactttatcttcaccgtaccaatcaccatcataataagataacgggtataaactaccttctttgacatatttcaaaatcgtattgaagaaatgtgtgttatcaccttttgaatgataactataaaacttttgatatcctgaattcaactcgttagcaagtaataacatgctcgttgaaccattttgtctaaagtttaaatcaatcgcataaacgttatcatcctcatcgacgagtaggtcaaaaccagctacaccaaagaatccttgattcacaccgttttccataatttgtctacctgcttctataacgtgctctggtacattagtagtattttcatttccgttataaaatccgtacttatccgttaattgcgttgccgcaccaagatattgaatgcctagcgattccgagtatgcaaactgaacgcaataattcgctttttcttcaatcttctgttcgataataagcgaattcgtttcagcagttgcctctttaatacgcgttatcgctttttgtaaatctgcatcatgataacaaatcataacgccatagccacctgctgtcggaagatcatctcccggcttaattactaacgggaattcccaattcttaatctcgttttcgaattgctcaatttttacaacttttctttttggtaaaaacttcccatttgtccattcaggtattcttgctttattatttaaagcaacaaataacgttttatctaatgcataatattgctgattcaagattgtttcatcatgaatatattgaaaataaatctttttattttccttatgtgccaattgtttgatcaagttttcgtaagattgctgattgttaaatgtataaattgagttcggtacttccttaccaataacttgaaatagctgatgcaatttgtctgtcgcactagcttcgtgaacaataacaggtaattgatttgctattaataactccctaccagttaaaaaattagattgatgttcgtccggtttcaaccatggattcgatatatacgaaggtcttgacgtatagacaacatctttgtcatataaatcacttaacgttaagttcggctcattaccattatttgtcattacttcccattccctttcaaatgcgcatgctcttcaataatgtcttgataaacgtcttgatttgtaattaactctaaccccatcaacgccattattttagcacctttaattaatgcttcatcaccatgtacactcgcagccgcttctctaaatctatgcgtatgtcctactaaattacgtgatcctattttaatatgaggatgtattgttggcacaacatgacttacgttccctgtatccgtagagccataaccaaaatcatcatcaataactgcttcaccaacttcttcagcatatttagcaaataaatcatctaatttcggcgttttaatgaattcattcacaccgttttgaattggaccaaattcataatcacaaccagtctgtatcgcagctccacgtgcgatttgatttactttttctgttaatatatccaattctttacgcgtcattgctctagtataaaaacgagcatgtgtatagtctggaataatattagctgctttcccgccatctaaaatcacaccatgcacacgttgatcttttttaatatgttgtcgtagttgtgctacaccattaaaataactaatcatagcgtctaatgcatttaacgcttcatctgcattttcagaggcatgagcactttttccgtaaaatttaacatctaaaacatccactgccaaagtatcaatcgttttataagtttcatttcccggatgaatcattaaggcaatgtctatttgatcaatcacaccagccttgacataagaagctttagcgctaccattttccccaccttcttcagctggacatccgagaacgactactttaccaccaatttggtcaatcacttgcttcaaaccaattgcaccaagcacacttgcagttccaatgatattatgaccacaagcatgacccaatcctggcaaagcatcgtattctgctaaaaaacctatagctggcccgtcaagacccgaatcatatgtcgctataaacccagttgcatgtccagcaatctcggtttcaatttcaaaatcatgttctttcaaacgatctattaaagttcgagacgcaaatatttcttcattaccaagttcaggacgttcatgaattctatgactgatttcgatataactatatttatttgtttctatataatcgagaatttgttgtttttcactcattttttactatctcccttttaccctacactcattttaatcatccacaatattttgttctttcaaaatgaattattacttattctatcggttttatctcatgatgtcatctagtttttctttatttacaaaattttctaataactaaaagcctttcataaatttataaaacagtttcaaattgtaaaacataagccctattgttacaatttaagtattgttagaaacacaacttacaacaaacttaagttttataatgcaacaaatcataagcgttttatagttttgagtagttaataggaggaaattcaaaatgacaaaaatgaatgttgaaagtttcaatttagatcatactaaggtggttgccccatttattagattagcgggaacgatggaaggattaaacggagatgtcattcacaaatacgacattcgtttcaaacaaccaaacaaagaacatatggatatgcccggactacattcattagaacatttaatggctgaaaatattagaaatcatagtgacaaagttgttgatttaagtcctatgggttgccaaactggtttctatgtatcatttattaatcatgataattatgatgatgtattaaatattgttgaagcaactttaaatgatgtgctaaatgctactgaagtgcctgcttgtaatgaagtacaatgtggctgggcagcaagtcattcattagaaggtgctaaaactatcgctcaagcatttctagacaaacgaaacgaatggcatgatgttttcggtacaggaaaataaatcttagtcaatcaagttaatcagaaaagcagtcgaacaatgatgttacaatcgccattgtccaactgctttttattatgcttcaaagtcaaaaaatcgaacaaatgaaaaagtaaaatctttaacatttgtccgatttatttgagaaccactataatttcttaattagtcccattaacacgaactgcataggtaaccttaaatatagttgccatgttggcaattgtttatctcctaaaggtaactttttaactgccatatagatattagctgggaatacagctagcaagaatagattgattgtatttttcaagcattgagatggtcttttaattaaaagtgcaagtccaaataatatctcaaagattcctgtaacaagaaccgctgtttttcgaagtggcaaacatttcggtatgatatttctaaattgtcgttctcgtgtaaaatgcaatacacctattacactaaaacctattcctaataaatatcttagtatgttcaatcagcttcaactcctattctataatgattttatgaattaatgtaggcgatacaacatgatcagcaattgttatgcttgaatctaattttttaacaacatcgtctacatcttggcgattactgtgaatcgttaataatgattctccttcttctactttatcaccaatttttttatttaaaacaataccaaccgctaaatcaatatcatcctcttttgttaaacgtcccgctcctaacatcatcgaagcgacacctatatcgttagagactaattcagtcacataacctgattttttagctttatattcaatttgatattgagcttgtggcaaacgctctggatggtcaataacagtttcgtcgccaccttggtttttaataaatgttttgaatttttctaatgctgcacctgaattaattgcctcaattagcaacgctctcgcttcttcaagcgtttcagctttgtttgcaagtacaaccatttgagaacctaatgttaatacaagttctgttaaatctttcggaccttgtcctttcaacgtatcaattgcttcttgtaactcaagcgcattgccaatcgcacgtccaagtggctgattcatatcagaaataatcgccatcgtattacgtcccacattattaccaatacgtaccattgcgtgcgctaatgcttcagcatcttctaatgttttcataaatgcaccgctaccagtttttacatctaatacaattgcatctgcaccagcagcaatctttttactcataattgaagaggcaattaatggtattgaattgacagtaccagtaacatcccttaaggcatataattttttgtctgcaggagttaaatttcctgattgtcctacaactgccactttattttcattaaccaatttcacaaatgttgcttcatctatttcaacatgaaaaccatcaattgcttctaatttatcaatcgtaccacctgtatgacctaatccacgcccactcatttttgcaacaggaacatctacagctgctactaatggtgctaaaaccaatgtagttgtatctcctacaccacctgttgagtgcttatctactttgacacctttaatatcactcaaatctatcatatcaccagaattaaccatagccatcgttaatgctgcacgctcatcatcattcatatcttggaaataaatcgccattgctaaacttgatgcttggtaatcaggaatatcccctttaacatagccgtcaataaagaaattaatttcttccgttgttagtgtatgaccgtcacgctttttctcaataatgtctatcattctcatttttatcatccttttcttaaaaagcttaggacaaagcatctgcgctttctctagtccatttttaaaagcacaagcgaaaattattatagcaagctatcgatttcatttttaatatcacaatttcaatgcgatgttattattcttaaatagattggttataacgttaaagtccctattaaattaacttagaatcatcatggcatttatgatgtcttaaagctgatatcgacatacttatatatggttacgatgtcccatgcttacatatttttttataaaattagtaatctgaatctgcttctaaaccttgcataatttgaacgcctgcgctcgcaccaatacgtgtcgcacctgcttcaaccattttattgaaatcttctaaattacgtacgccacctgatgcttttacttctacatcagcacctactgtatctttcattaatttaacgtcttctgcagtcgcaccgccacctgcaaaacctgttgaagttttaacgaagtccgcaccagccgcttttgttaattcactcgcttttacaatttcgtcatggtccaacaataccgtctcaataatcacttttactgtgtgacctttcgcagctttaaccactgcttcaatgtcttgttgtacatcatcaaaacgtccatcttttaatgcgccgatgttgatgaccatgtcaatttcatctgcaccattttgaatcgcatcttctgtttcaaatgctttcgtcgcagttgtcgatgcacctaatgggaatcctattaccgtacaaactaacacctctgaatcagctagtcgttctgctgcatatttaacatgcgttggattcacacatacagatttaaaatggtatgctttcgcttcatcgatgatttgatcgatttgcgtacgtgttgactcaggcttcaataaagtgtgatcaatcaattttgcactatgcattttctatctcctcctttatggttgattataaaaatacggttgtaaattagttgattgagcgtcaggttcatttaaatatcaggttagatgttcgctttttatgtaaccgcatacatatactattacattaattcatttcccataaacaaacaatacaattgaacgtgatatcttcattatgaacgatgacttgacaacaagctaatcaggattatatttttataattctttaattctatagtacaaaaattcgcaaaaaagggaaacaaatgttatcttaaaattattaatgaatattaaggagaagataacaaatgacaaaaggtacaccacatattcaaccaaatggagtaaaaattgctaaaacagtattaatgcctggcgatccgctacgcgcaaaatatattgctgataattttttagaaaatgttgaacaatttaacgatgtacgtaacatgtttggttacactggtacatataaaggtaaagaagtttctgtaatgggttctggtatgggtattccaagtattggtatttactcatatgagttatacaacttctttgatgtagatacaatcattcgtatcggttcttgtggcgcattacaagaaaatgttaacttatacgatgttattattgcacaagctgcatcaactaattcaaattatgtagatcaatacaatattccaggtcatttcgcgcctatcgctgacttcgagttagtaactaaagctaaaaatgtcgctgaccaaatcggtgctactacacacgtaggtaacgtattatcttctgatacattttacaatgccgatccaacattcaatgatgcttggaaaaaaatgggtattttaggtatcgaaatggaatcagctggtttatatttaaatgcgattcatgctggtaaaaaagcacttggtattttcacagtaagtgatcatattttacgtgacgaagctactacacctgaagaacgtcaaaattcatttacacaaatgatggaaatcgctttagaaatcgcagagtaacttatttaaattgactttaattgctctttaacaatgcgattaaactcaaaaagccaacacattctgggcgtatccccatttatgtgttggcttttatttatattattacttatctgtagattagcttaagtaagatttaaacatccaattatgtttatctactgatgtttgcatacctataaacatatcttctgatacatcatcgccagcattaccagcaatttcgattgcgttttctaattgttttgagatatttgtgaagtcttgtgataattcttcaaccatttgttctgcagagtaacctttcgcagcttctttaacaattgattgctctaagcattcagttaatgtacctacagggtttcctcctaccgctaaaattctttcagctaattcgtctacatattggcttgcttcattatataattcttcaaatttaacgtgtaatgagaagaagttaggtcctttcacataccagtggaaattatgtagctttgtgtaagctactgtccagtttgctacttgttgattcaattcttttacaacatcttgttgattactcatatttaatacactccttaaaattgtctacgtcttgcttgtttatattaattattatattataatgattctaatctgtaaagtgtttttactctcttttttataattattctaatctaaatgtaaggtgttccgctttttaaatgtctaaattttaattcatcatctagtatatccattatcaattagcaagtatgttttatcaatcagtaagttttactttcgcattatcatctaaaaagaacgatttttcataatcatttggttggtgccatgttgttttccacattctatttctattattagcaaacattcgataaccgaaattacggactggtttaggtacaagccataaacctacgcccaataatttagttcgattaggtagtgctgtgattagtttaataatcgcctgcgattcaaaatatatacgatcacctttctgtaaaatcacactatttttatttgccgcttctggatgttgtttaaaaaattgttgtccaacttcaccttttaacgtggcaaattgataatttcttggtaggtcatgttgaattaaccaaatgacatagttataacaatatatacagtttccatcataatatacgattggcataatttattcgctcctttaatagtacttatagtcatttttcctaatttaaaaacatttaaacaaggttgtcacttgataagtcctcgcgacacgaaattgccataaaatttatttttcagttttatatttattgtataatgtattttttatttactttaaatttctcaatctacagtgtaatcttatttcttattattaacttagcgtttggtcattcgtcttattcaacatacgactggaaaactcatataaagttttaattcagtaacataaattcatttatattcatatactgtctttattatttattaaaataaaaacgagtaatctatcataagctcttaattagctcttatggttgattacccgtcatttttctttatgcggttattcaaatatgcaattatgcaatttttaatcctatccttacttcttttcaaaaactaccatatatcattagtcatgtttgactttgactatacgtgtgtattttaaaaactgctctgaatatttctccttaatttcctctaaactgtcatatgtaatacctacaatatgccaattaggattgaaataatagaaagaatctttttgtcgtgaccatttaatcatattaccgtctttattataacgtggtaatgttacttcatagccttctaacacattaatatacgtttggaaaatgtctgtatctatacgattaaaattatcaataactaaataacttttatcctttttaggcattaattgagtaataaacccttcacgatagtataatgcccctgtttcatttggtaaatacttgccataaagcatatcttctgaaaaatcaggatgacctgttgttataacaggatttgcattcgctttttgcaataagtcattagccgcttttaagccttcttcttttcgatctacaacaagtaaaataaatggctttaacgcttcttctttttcactttcaagcatatctggtttttgaaccatttcaaatggagatttcaatccattattatcgctcatttcaataattgcatcatactgtgcttgtgacatacttgcaatagcctgttttgcattttcttgaaggaaatataagtttttcaatttaggatgcttatttaatgtacttaatgtaatcggtgtaatgtctttctcataagacacttcaatcactgtactatttgttctaccaggaattggtggtttttcatgaatatgctttgatacttctccaattccaacgacagattgatttttcgttcgattataaaaaataatattgtcgccttcttctaactgagtataaaaatgataaccattacgtttaataccgttgtacgtgtgcgtataaatcgtatattggtttccaggttcaaattcttcagtttcagctaaaaagaaataacgcggtatcttaatttcgcctttaccaagaccacttattaaatcaaactcttctgcagtgatttgattgaacaatgtctctttcatattactcatacgaaattccaaagcttcactacgctttaaataatctgctgttaatggtttcaattgttcattaaaacgaaactgtacacgtattttattttgtgcacctgtttcaacactaataatttcaccacatccaagtagtccagtatccgtctgaacttgataaaagatgacttgatctcctactttagcctttttaaacgctctaaatccttgagatgggttaaaatgtgcgcctgattcaaataaagctgtttgtcctactaacggttcattatgattccaacggttatatccacaattcaaccaaaaataattcgtttctgctgtcatcttaatactccttaacctgaataaattttagaaacactatgaattacattcttttagtgtttcttatgcagttggacgcgtatgcgaacaactgtataccctttgttcactgcgattttaatcgcatttcctataacattgtagcgcccaggacattattttacgtcccagacccttatcgttttcacttctaagtaagtcgaactattttgctttacaacaagtgcgactctaaatacagttggacacacatacgagcaactgtataccttttaatcagttttctatattttatttattatatctgtcttaatgataaaaattgttacaaacagtttaacatatttagctacctattttgcatataaaaaacatgcttgcatacactatgcaataaaaattacaaatttatatatgataccactatgcttgcttatctctatagcgccattgatacacatttttaaatatctatactgccgttagaattttatcatgtcttaattttcattaaatattaattacttcattttatataaaccaacaaaaaccccctcactactatgcaagtgagaggttatgttgatgtgctttattttcatcaatgtcattaacacaatcatatttcttctgttaatgcactgtattatattcaaacgcgctatcgacaattaatttgaagctacaaaggtaccgcataatggcagcacattaattaacaatgcgctaaactttaatgaggcgctgatttgcttgtctttaaaagtcaacatagcactgataattcctaaaatagctactatacgtggaattgtcatgctcggatactgcggtatatgtaagaaagcaccaagacctgctatcacaccacatactaacgcaatatatagaaattgcttcaaatcattcactcctaaattgttattacactattacacatagctaatcatcaatgtgaaatcgccttcaaagacactatccaaatcttcagaagtcaaaataaagtttgtaccagtagtcagtttgaaaatttcaccatcgacaatcatttgcccttcgccttccaacactgtaactaaacagaactctctaggcttcatataatttaacgtgccagaaatttcccatttaaccaatgtaaagaaatcattcgatacaatgtgtgtacacttatggttttcaataatttcgctttcaggcaaaatattaggtaatggtgcattgtactgaataacgtctaaagctttttcaatatttaacggtctatcattatattgattatcttgacgattgaaatcataaagtctatatgtaatgtctgacgattgcatcgtttcgtatgctaatattcctgaagaaatagtatgtactgttcctgctggaataaaatagaattctccaggttttactttaatatatctaagtatcgactctatcgttccgtgttgaacatgattcgcaacttcttctctagactctgctaatgtccctataactatttctgcatcttcttctgcatctataatataccaacattcagatttgccatattgcccgttttcatgctcataagcataagaattatcagggtgcacatgaatagaaagtgattctcttgcatccactattttagttagaagcggaaaatctttgcttgggaaatcaccaaacaattcacgatgttctgaccaaatacggtctaatgtttgaccttgatatggtccattaataatctcgctcgtaccatttggatgtgctgacacacaccaacattccccagttgtatcattgtctaattgatatccaaactcacttagacgttgaccgccccataattttgtttttaaaattggttgtaaaaataatggcattgttgcacctccattgtgattaagtaagcaatagaactctgatgttgttgttccattatattttgattttgttctcatttacatcgtattattaacttccacatttcaaattaactattagtgattgtaccatatttactaacattgcagtactgccaattaaagcgcttcacttaaatttacagtactttaacattttcaaaaatttatagcatagagattatatctctcttacatttgtacatatttccctttaaatttactcgcccattataccaattaataaacaactttaatagttgtgccatacattgttcaaattctttgtaaaacgcatagacaatacgtacttattcatacttataattcatcattttcaaaaaataacgagttacgaaaaagtaacccgcttcaaatcatatttactatccttattaatccgtttcattttcaaattgagttaaagcatctttaatgtcctgatcaccactaataatttgaaactcttggtgattaaaatgattggatgtgacaatttcttttaatactgtcgcaacatcttctctaggaatttcacctttaccatcaaaatattgtgcagcttctatctttccagatcctgctgcatttgtaagtgcccctggatgtaaaattgtataattcaaacctgaacgtcttaaatagtcatcagcgtaatgtttagctattgtatatggctttaaatcaccgctatcatcaaaagcctgacgtctcgaatcatatgttgaaaccatgacatagtgtttaatattggcctctttactcgcaatcattgatttaacagcaccatctaaatcgacaataattgttttatctgcacccgtgttccctccagaacctactgaaaagataactttatcgaatggtttaaacgtctcagttaaagtctctattgaatcattttcaacatcaacaagaattgctttcataccttgtgattttaacgcattaagttgatctgattgcctaacaccagcagtaaatggtacattttcttttgctaattgttgcactagtaacgaacctacaccgccattagcacctataaccaaaatattcatttacaacactctcctatttattattctctatgccataccactttatgagatatgtaaaacttgttacaactataaaaatcaattgacatactactgggaacgtattaaattaatatatgaacaaatattcatatgaaaggattgtcatataatgtcagaacaatattcagaaataaatacagatacattagaacgcgtaactgaaattttcaaggcattaggcgattacaatcgaatacgtatcatggaattgttatcagtcagcgaagcaagtgttggtcacatttcacatcaattgaatttatctcaatcaaatgtctcgcaccaattaaaattacttaaaagtgtgcatcttgtgaaagcaaaacgacaaggccaatcaatgatttattcattagatgacatccacgtagcaactatgttaaagcaagccatacatcacgcgaatcatcctaaagaaagtgggttataatatgtctcattcacatcatcatcatgaccatatgcatagtcatgtaactacaaataataagaaagtattgtttatatcgtttttaataatcggtctatatatgtttatcgaaatcatcggcggtctccttgctaacagcttggcattactatctgacggtatccatatgtttagcgacacattctcattaggtgttgcacttgtcgcatttatttatgctgaaaagaatgccacaactacaaaaacatttggttataaacgtttcgaagtactcgcagcgttatttaacggtgtaacgctttttgtaataagtattttgattgtttttgaagcgattaaacgtttctttgttccttctgaagttcaatcaaaagaaatgttaatcattagtattatcggtttaattgtcaatatcgttgttgcattctttatgtttaaaggcggcgacacttcacacaatttaaatatgcgtggtgcttttctacatgttatcggagacttattaggttcagttggcgccattactgcagctattttaatttgggcatttggatggacaatcgccgatcctatcgcaagtattttagtttccgttattattttaaaaagtgcttggggtatcacaaaatcttcaattaacattttaatggaaggcacaccaagtgatgttgatatagatgaagttataactactattaaaaaggattcacgaatacaaagtgtgcatgattgccatgtttggacaatttcaaatgatatgaatgcattgagttgtcatgttgttgtagaccatacattgacaatgaaagaatgtgaattattattagaaaacattgagcatgatttattacatttaaatattcaccatatgactattcaattagaaacgcctaatcacaaacatgatgaatcgattatatgttcaggaacacatagtcattcacataaccatcatgctcatcatcacgcgcatgtacattaataattttaacctactgccattgcatcgattaaacttttcaatggcagtaggttttttatgtctttatggcgacttgtttggtctttgatgatgcaatgtttattaacaaattttcaactattatttcttacattagtcatatttttgacaatttactattataattctctaactttagtcactttaattaatttttattagatattaatatgaaaataacgtgttttttgttattgtatttatatgaagaaaaggaggcaccactttgtttacttactttaaatcagcatttaaaaatgctaaaccacaattattaataacattgatatatgcacttatagcatttgctgtaattgcagttgtatatttacttgctaatttccagcttgctaagtatgcacaaactattgcaatttattcacaatttgggcaaaaaccaccagtagatgcatatttaaaagttatcgctgtattacttatagcagctgtagtttcactgtttgttttagttcaaatttttatcggaattacaaatgttatgaaacgagcaatgagtcatgaaaaagtaaaatttaccgatttatttattgcatttaaaaaaggtaattatttaaagagcgttctgatcggtcttgtatctatagcaatgattatcgttctttcacttctgacatcattactatacaaattattttctccagtatcagaaatgattatgaattcagtacaatcatcatatgcagatagtacacacctgattggtattgctattacaactcaaagcatcataatcattgttgttttattgattaaagcaattattacttggttattgttaatacctattttcaactttatgactagtttcgttgaatcaactaacgataaagtaaaaacacacttagctaatggatttaaagcaatgaaaaatggtcaaaaaacatttttcaaatttttcattggaatactattattaaacttaattattattttatttaaaacacctgttggttacttgatttcatttaatacgcaatcactctctcaaagtgttgcagaaaatatcataagagtttatacagtaatgacaattattttattcgttgttattcatgcaatcattttaatgggtatcgttcaatattacttaaaacgtggtcaaaaaattactaaagataaagtaaaaacagctgacaagaataaaaaagttgtaactgaaccaaaaaatacaaaagtagaaaatgataaagtggcaacatctgttgaaacaaaaacagaaaaagcacaagattcattaaatgataatacaacaaaaacgatgacttcagataaaccagaagacaatcaaccaaaataaattttagagccccttacaactttagttgttaggggctcttatgcatgcgcttagcgcaggcgctcctacttttcaactttagttgttaggggctcttatgcagttgatgcgtagcatccaactgtgttcctctatttttcaactttagttgttaggggcttctttctaaaataactaagtgaattatctatatatgaagaggtctccaatactttttatataattcgtgattacattctatacttttaattgtattttctgctgtatggaaagttggttttattaattctgattatgttcagaactacaattcataagaaaaatgtgttaaaatatatttgtagtaagtagaagcaaaagatgaaaatcattaactcttgaaacacaaaaagggcaacactcggaaacatgttaccctaatgagcccgttaaaaagacggtgaccttatattttatttaaaaatagccttcaaaaatgccggtcaaagcgaatagaaggttattttttatggtcttgagtactaatcaatactaaaccaatgattgttaatacaaccataagcatttcaaaatcagacatgctagtcctttctaggagtaacaactataaccataggcatcacccctttattaagagattagccaccatctatccaacttgctcaataaatattataacatgcacacttttaaacagtaattcatagtataagttttttcatttcttaatcaactcgataaacagttgagtgacatacccttgtctaactagctatttcttcccctgttatcgtttgttcatcatataaaaatttaatttctcattttttattctctggtaaagaggggcgcccgctttttcggctgatatgctcccttcaaaatagacattgaaaaatgaaaactttgaaagagaaatcgtcagtctattattgataagtattatcctatcctcgaaaaattactttcagacactagtgaacaaaaattttactataagcgtatactttggcaatattcgaaggaaaaacatggattaacctgtgcatattatacatttagagcttatatacttaaacatgatgaatttactccttatattatgaaatgttatcaatagatgtcgcctaaagatacaacaagattcgagacaaaacctgatcatcaagcacagtttgactggaaagaaagcattaactttaaaacgaaagataatcaaaggattccactatatataggtgtgctactactttattattctcgttttataatcatgcataacaatgagtaaatcaagtgatgccttatttaattcattaacacaatcgtttgagctaatagaaggtgtatataatgaacttgtaacggataacttgaaaatagtcatgtataagccaagaaaagaaagtacaagtggtcgaataaatcgtagatttaaataattcgctgatggttttaaatttcaagtaaaaccttgtatttccggcctccctagaaaaagataaagttgaatcaataacaaaaatattagatgaaattaatgcttaccaagacgaattgcatttggaagagattcctaagtttttttaatcttaatgaacgatttaactactaagttcatactagtacaggtaaattgcctattactgcctaagagaaagaaaaaattttcttacaaccactacagaatgtgaatgtaaaaaactcatataaagtgaaacatatcttacttatggaatgaaatgtttgattatcccaaaatcacaaatgcgattttggagttgttagggctctaacgcaaatacacccctacttaaaataacggtagttgttatagtatacttaaatgcataaaccatataaaaggtgatgctaatatgacatacggttcaattgtagctatactctgtgccctatttgtgattttcttcattccatatatggagaagaaagacaaaaagaagaaataacactagtatctggattactagcatacaaaggagcagtaagacattttctaatagaaaataactttactgctcctttgtaaattactcttcaactattgtaaattaaataataaataactgccgatgttattaatcagctaaaaaatgctttgctaaatattttgctgcgccatcctcttcattcgtgtatgccgttacatctgaagttaatgcttggatttcagggcgtgcatttttcatagcaactgtataatgaccaaattcaaacattgctctatcattgtcgctatctccaataactaacgtttcttcttgatgaataccaaaatgtgcaatcatttctttaatgcctgtacctttatcagtttgataagccattgtttccgcattaaatcttgatgaatttgaaacactaatctgtagttgcacatgattttgctttaattcatctctaaatgttgttattttttctaaattagaactgaatagataaatttttgaatattccccttcaggaaacttagttacccaatctatcttaccagcaagcgcatcttgtcttgaagaccattcactatgacttacgccattaataggatcttgactacgaatcatatctcgcatccatgtttcatcttcttttaaagaaactctattaccttcaaaaggaaatacctcataataaatttgttggcgcttagctaaattagtaatttgttgcacttgagccaatgataaaccatgcttgaagataatttctccatctacttctccaattgttccatttgaactaatgatgccatttaccgcaaaatcttgaggtacaagttgatgtatttcagaatgcgaacgtcctgttgctaaaaatactttatatcctttctctctcaattgattaatgacatctttcgtatacgttgatgcttgattattttcatgtaaaattgttccatccatgtccaaaaatattgcttttacgttatccatattgccctccactgtccattttatcttaattaaattttgtcattattacttattatttgcaaaatatttactctaacattgccatagaaaatcgattattccatctttgaactgctacatttttctggaaaaatcgtgacatgttttcagatgtcaaaatatcatctattaatccttgttgtacactttccccatcttttaatagcaaaattttagtaaagttaccagtaatttcttcaataaagtgcgtcacataaatcatcgcaagcgttggatatgaatctgacaatgagtcaagtatattcaatagtgactcacgagcaataaagtctaaaccagctgctggctcatctaaaattaaaacctggggttgccccattaaagctcgtgcaatcatcacacgttgcttttcaccggtagataaataacctatacattgattcgctttatcaaacatttcaactaatttaagtaattgatgtgcttcattacgtacctcatcatcaatatcttgataaacaccaattgatttaaaagcaccgcttatcaccacatcgattactctttcaccctcttgaaacttttccagtaaactatgagatacaaaacctatatgttgtcgtacagtctctgcagaataccctaccttgcctggcattttaccaaatagattaacaccgccagttgtcgcaggctcatatgcatttaatatatttaatagcgttgtcttaccagcaccatttaaaccatatagaatccatttatcacctttagcaatttgccaagaaatcttttttaaaattgtttttccttgcttcattcgcccaatttgatctaattgaattaacatgcgaggtcacccctttattgctactccatacttctcataaaatcatattaacataacacccttaattgtcagactatttaaataaataaaacacttcatttttacgcatttctgccaaattaagatgaagtaaaagctaagtcgacctaaaaaagcacccttctagtcgattaatctaaaagggtgccatatactttaattttaatacatgattgattctaaaaaagtgaattattccacagtaactgatttagcaaggttacgtggtttatcaacatctaaatctctgtgtaatgctgcatagtatgaaattaattgtaatgcaaccactgatactaatggcgttaacaattcatgtacatgaggaatgacataagtgtcgccttctttttcaagaccctccatagaaataatacatggatgtgcaccacgtgctactacctctttaacgttaccacgaattgataaattaactttctcttgtgttgctaaacctacaactggtgtaccttcttcgattaaggcaattgtaccatgtttaagttctccaccagcaaaaccttctgcttgaatgtaagaaatttctttaagttttaacgcaccttctaaacttacgttatagtcaatagtacgtccgataaagaatgcattgcgtgttgtttctaagaaatctgtagcaatttgttccataattggtgcatcgtcaacaattgcttctattgctgttgttacttttgctaattctctcaataaatcaatatctgcttcacgaccatgctcttttgcaacgatttgagacaagattgataatactgcaatttgtgcagtatatgcttttgtagatgcaactgcgatttcaggacccgcgtgtaataacaatgtgtggtctgcttcacgtgataaagttgaacctgcaacattagtgattgttaatgatttatgacctaatttattagtttcaactaatacggcgcggctatctgcagtttcacctgattgagaaatataaacgaacaatggtttttcagataataatggcatgttgtagacaaactctgatgcaacgtgtacttcagttggtacgccagcccatttttctaaaaattctttacctactaaacctgcatggtagcttgtacctgctgcaataacgtaaatgcggtctgcttctttaacatcattgatgatgtcttgatcaattttcaagttaccttctgcatcttgatattcttgaataatacgacgcattactgctggttgttcatgaatttcttttaacatgtagtgtgcataaacacctttttcagcatctgatgcatcaatttcagcaatatatgaatcacgttctacaacgtttccatctgcatctttaataataacttcatcttttttaacaataacgatttcatggtcatggatttctttatattcgcttgtcacttgtaacattgcaagtgcgtctgatgcgataacattgaaaccttcaccaacacctaataataatggtgatttatttttagcaacatagattgtgtctttgtcttcagcatctaataaacctaatgcatatgaaccatgtaataatgacacaacttttgtaaatgcttcttcagttgaaagtccttgatttgaaaagtattcaactaattgaacgataacttctgtatctgtttctgaaatgaatgatacaccttgtaagtattcaccttttaactcttcatagttttcaataacaccgttatgaactagagtaaaacggccatttgatgattgatgtggatgagagttttcatgattcggtacaccgtgtgttgcccaacgtgtgtgaccgattccaacaggtccatcaaaatcgctactatcagcaactttacgtaattctgcaatacgacctttttctttaaatacagttgtattatcatcatttactactgcgatacctgcagagtcataacctctgtattctaatttttctaaaccttttaataataattctttggcattatcatagccaatataaccaacaattccacacataacgacattttcctccatattggaatagtacgcgtaaattatgatttattgccgataatttagattgacaatctgctttcataatataaataggaacatgctatcatcgcattcatccataacaaattaagcatagttatttttacaactatacaaattgctcacactgtactttccatattaatattttttatattcaatttctggcgatcttattaactttgtccattaagtcaccctaatgttttacttaataagctaacgaatgagccacatccgggatagcatccgccgatctattcgatcactatcctcctcgtctacaaatacatatattgcactctataaaggccactcatatattaacctttaatcttcaaatacaaatatttatttgcacaggcgctttaactgtactgccgaactttccccctttccattaatcattattgtacaacggtgttgttttgttttgcaaatattttcacaataaaattttaaaaatcctaaaacaatttttttgttttactttttcaaaatatctatactgtcacattgatgacactttatttaattttgtcacatttattttgacaaagttgatttttgtttatattgagtaacaagtaacctctctatacactatatatagtcacatatattaaaaaagaggtgtaaacatgtcacaaactgaagagaaaaaaggaattggtcgtcgtgttcaagcatttggatcattcttaagtagtatgatcatgccaaacattggcgctttcatcgcttggggttttatcgcggccatttttatagataatggatggttacctaacaaagatttagctactttagcaggaccaatgattacttatttaatcccattattgatcgcatttagtggtggtcgtttaatttatgatttacgtggtggtatcatcgcagcaacagcaactatgggggtcatcgttgcattacctgatacaccaatgttacttggtgcaatgattatgggtccacttgttggttggttaatgaagaagaccgaccaattgattcaacctagaacgccgcaaggttttgaaatgttatttaataacttttctgctggtattttaggatttatcatgacgattgcaggatttaaaattttagcaccacttatgaaatttattatgcatattttatcagtggcagttgaagcattagtacatgcacacctacttccacttgtaagtattttagtagagcctgcaaaaattgtatttttaaacaatgcgattaaccatggtgtattcacaccgcttggtgcagatcaagctgcaaaagctggtcaatcaattttatacacaattgaatctaaccctggaccaggtttaggtatcttacttgcttatatgatttttggaaaaggcactgcaaaagcaacgtcatatggtgctggaattatccacttcttaggtggtattcatgaaatttatttcccatatgtattaatgcgtcctttattatttatcgctgttattttaggtggaatgactggtgttgcaacttatcaagcaacaggatttggatttaaaagtcccgcgtcaccaggttcatttatagtttactgtttaaatgcacctagaggtgaattcttgcacatgttactcggtgtcttccttgctgcacttgtatcattcgttgtagctgctttaattatgaagttcactagagaaccaaagcaggatttagaagctgcgacagctcaaatggaaaatactaaagggaaaaaatcaagcgttgcttctaagttagtatcttctgataaaaatgttaatacagaagaaaatgctagtggtaatgttagtgaaacatcttcatcagatgatgatcctgaagcgctattggataattacaacactgaagatgttgatgcacacaattacaataatataaatcatgttatttttgcctgcgatgcgggtatgggttctagtgcaatgggtgcaagcatgttacgtaataaatttaaaaaggcgggcattaatgatattacagttacaaatactgcgattaatcaattgccaaaagatgctcaattagttatcactcagaaaaaactaactgatcgtgctattaaacaaacaccaaatgccatccatatttcagtggataatttccttaattcaccaagatatgaagaacttttaaataatctaaaaaaagatgatcaagcataataattaaataaattaaaaaatggaggataccgccatgttattgagtacacgtgaaaaagaaatgatagccctattgattaagtaccacggtcaatatatcactatacacgacattgctcagcaacttgcggtgtcctctcgtactattcaccgtgaattaaaaggtgttgaagcatatttaacttcattttcattaactttagaacgcgcaaacaaaaaagggctacgcattgctggcacagattctgatttaaacgatttgaagcaatcgattgcacaacatcaaaccattgacttatctgttgaagagcagaaagtaattattatatacgctttgatacaagccaaggagccagttaaacaatatagtttagcgcaagaaattggcgtttctgtccagactttagcaaagatgttagatgatttagagcttgatttaaataagtaccaactatctttatctcgaaagcgtggcgaaggcatttacttggtaggtactgaatcaaagaaacgtgaatttttaagtcaattaatggtgaataacttaaatagtactagcgtttattcagtaattgaaaatcattttgtctttcattcattaaatcaaatccacaaagactttgttgacttagagcgcatttttaatgttgaaagactattaatggactacctaagtgccttaccctaccaacttaccgaatcaagttatttaactttaactgtccatatcgtgctatccatttcacgtataaaaaatggtgagtatgtcgcattaaacgatgatatttatgattctgtacaaaacacatttgaacacaaagtagcaagcgaacttgctgataaacttggtcaaatatatgacgtcacgtttaatcaggcagaaattgctttcattactatccatttacgtggagctaaacgaaaaaatcttaatgatacatcattaaataatcgttgtgaagaaaacaaaattaaagcgtttgttaacaaagtagaaatgatttccggtatgacatttgcagatttggatactttagtagatggactgacgctacaccttaatcctgcaatcaatcgtttgcaagctaatatcgagacctataatccgttaacagacatgattaagttcaaatatccaagactatttgaaaatgtaagattagctttaaatgattgttggcctgatttgatttttccagagagtgaaattgcttttataattttacactttggtggctcgattaaaaaccaaggtaatcgatttttaaacatattagtcgtttgcagcagtggtatgggaactagtcgtctattatcaactcgtctagagcaagtttttagtgagattgagcgtattacacaagcatcagtcagcgatttgaagtcactagatttaagtcaatatgatggcattatttctactgtgaatttagacatcgactcctcctatttaacggtaaacccattattaccagatagtgatatcagttatgtcgcacagtttttaaatacaaagtctacgttccaagagatgcatgataaatcatcaaacatgattgataaggatgatgttcatgttgaaacgaaagatattgatggcaacacatcttttgaaaatgaacaaacttcaaacttaacttcagttttcgagaaacatttaagtgacgaaaaatcagaacaattaatgcatcatatgcgttcgggtttaactttgcttgattcagtgaaaatagttagtaccgaagttaaacagtggcaaacatatatcgcagattatctatatcaatgcgatgtaataaacgatccaacgtcattcgctgaactactagagcaacgattgattgacaatccaggatggatattaagtccatatcctgttgcgataccacacctaagagacaatatgattaaacaccctatggttctaatcacagttttagaagaaccgttaatattgcctagtattcaaaatgacaatcaaacaattaaatatatgatttccatgtttattcctgacaatgattttatggcatcactggtaagtgacttgtccgaatttttaagtttgaaattagaatctattgatacttttatggaaaatccacaggaacttgaaacattattaagaaacaaatttttagaacgaattaaaaaacaatttatttaggagtgtacaaaatgagcgaattatttagtaatgacaatatctttttaaatgtaaatgttaacagccaaaatgaagcaattgaaaaagcaggtaaagccttagttgatagtggtgctgtaacagatgcttatattcaagcaatgaaagatcgtgaacaagtcgtatcaacatttatgggaaatggcttagcaattcctcatggcacagatgaagctaaaacaaatgtgattcactcaggtttaacattattacaaatccctgaaggcgttgactgggatggcgaagtagttaaagttgtcgtgggaatcgctggtaaagatggcgaacatttagacttgttatctaaaattgcaattacatttagcgaagaagaaaatgtggatcgtatcgttcaagcaaaatctgcagaagaaattaaacaagtattcgaggaggcagatgcataatgaaagcagttcactttggtgctggtaacataggtcgtggtttcattggttatattcttgcagacaacaatgttaaagtaacatttgcagacgtcaatgaagaaatcattaatgctttagctcatgatcatcaatacgatgttattttagctgatgagtctaaaacaacgacgcgcgtgaataatgttgatgcaattaattcaatgcaaccttctgaagcgttgaaacaagcaattctagaagctgatattattacaacagctgttggtgttaacatactacctattattgctaaatcttttgcgcctttcttaaaagaaaaaacaaaccatgttaatattgttgcttgtgagaatgctattatggcaactgatacattgaaaaaagcagtacttgatattactggccctcttggtaacaatattcattttgctaactcagcagttgatagaattgtaccattacaaaagaatgaaaatatattagacgttatggttgagccattttacgaatgggttgttgaaaaagatgcatggtatggcccagaactaaatcatattaaatatgttgatgatttaacaccatatattgagcgtaaattattaactgtgaatacaggacatgcatatttagcgtatgctggtaaatttgcaggtaaagctaccgtattagacgctgtaaaagatagttcaattgaagctggcttacgccgtgttttagctgaaacaagtcaatatattactaatgaatttgattttactgaagcggaacaagctggttatgttgaaaaaataatagaccgtttcaacaattcttatttatctgatgaagtgacacgtgtcggacgaggtacgttacgtaaaattggccctaaagatagaattataaaaccattaacatatctttataataaagatttagaacgcactggtttattaaatacagctgcattgttattgaagtatgatgatacagcagaccaagaaactgttgagaaaaataattacattaaagaacacggtttaaaagcgtttttaagcgaatatgctaaagttgacgatggcttagccgatgaaataattgaagcgtacaattcactttcataatttattgagctttgtttgaaacaagaagtttccaacgttattcgttaacaatcagtaataatgtagtagttccgttgaattaacaatattaaatttctgaacataaaaaaatactcccttcaacatagacacttaacttgtgttatgtatgaaaggagtatttttgcgttaataatttgttttattttcgagccacagccacctattcaatggctattggtcattactaaaacgaattcatattaactgttagacttggttacttagtaaggaatatttccctatgaaataactagatgttcacattcttgaataaattttattcttcagtttgttggtctttcttagtgaatcttctaattaagaatgccatacctgcacctagagctaattcagcatatggtaaatcgtcattatgtgacataccagtatctggtaaagttttagcttgttgtttaggcttattaacttttccttgttggtctgattttgcatttgctttgttttcttcagtcttagttacattaagcatatcttgatgcatactatgactaccattagaaactgttgctggagatgcattggcaccgtcgttttgcgtagctttattgtttgcaactgggccaactgatgtttgcgtatcattagtttgcatatctttagctttattgtttgcaactgagccaactgatgtttgcatatcattagtatctgctgttgccgtatcatctttttggctaacattagttgaagtcattttttcttttgcttcagaagatgcagatgttgatggtttattcgaaacttcagtatcagctttgcttggcgatttatctgcttcgttagatgcaacgttagtttcagacttaagttgtcctgcatcagtttgatttgacgtactttcttctttatcttttgatgtattagaaggtacatttggttctgttatgtctgctgaaggcaatgtttcagttgttgattcaaccatactttgatttgttgaatctctaccatctttttctgccttagctttattttcagattttggttgtgcaaccttgccattagttgattgagattcagcactattatttacttcagcattttgttttgaatcatttacagatgcattatctttactatcagcagatgatgctgcttctgtgctcgcagttgttggagccgtcgttgttgatcctgttggtgcattctcgtttgttgctgtagttgtactattgttatttgttgtgctttctgctggcgttgcattatctgtttctgttacaggtttatcagttgtgccgttattagttgattctacttctggtttactagttacatcgttatccattgtcggactgtttgttgatgcatctgcactagaattgttattagcttgcggtttatcctttgcatcatcagttgctgatgttactgttgtttcacctgttgccgcatcactattatttggtgttgtcggagaagcgtctgctttgccattatctgtcgtctcagatacgttaggttgtccagtgttttctggtgttgcattagcatttgaatttgctgttgcatcattattatctgtaccattattagtatcattagcatctggatcattctgaggcacaatcgcttcaattgcaggtatcgttacattttgtaattcagcaacctctgtatttgtttgtgttttatctaatttatcagcaaatctgtcaaaatatctacctaaatctgtacgtgcaatttctttcgccgatgcatctgcatctgcatttttaattatttctatttgcttgttaaccacttctctaattgcttccaaagcatttttcttaactactggattaatacgttgtgctttaagttgttcaagcgcactatttttgacagtagcgatttctgcatttgtagtttgatcagaaatatcttcagttgcttttgataaaatgtcttctaaagcattcgtaaacgcttctttttcttcagttgtagcatcagcgtcgacatttacacctgcttcaatctggtctagtgcagtttctaattcttcgatagctttttgtttttctgttgagtcgatttgaatgttatcaaatgcttcaagtccttgagctttcgctttttcaacttcagcagttgttgttgcatcagtaataccttgtttagcttgatctgtaatttgtttaatcattgctaatgcttcagttttttcttcagcagttaactggtcactttgatcaatagattctttcgtatcttctgctttaacttcaatagcttggttcgctttaggtttaacagtagcatctacttgaatagcatcaattgctgctttaccttgtgttaatgcatcatcaacgtcaccattatccacaccattattaatgctttctaatgcagtttgaacattttggtcaacttgcttaattgcttgttgcttttcatcttgtgttgcattagtgtcagctgaaatattatttttcttctgatctgcataagcatataaatctgttgtagctgattcttttttacctgttggaattgtgtaatcgttaatattatctaagtcattatgaatttgaacttcaatgtcatctttagaagtagcttgattaacattttgatccgcagtttgttttaattcagcaagtttttgtttcgcttcagcaatttcacttgaagtcgatgcgttagagttatccgcttcgtttactttagcattatatgcatcttcaattttagctaaagcatcttttttgtactcactaaatgttttaactgcattaattttagcttttccttctttaactgcattatcaacatattcatttgttgatgattgatcgacatttgttttcgcttgatttaattcagtatcaacttcttgttttgcatcattaatttcttgttgtgatgcatttggtgtttgttctatttgtgttttcttatcagctgcagcttgatctaattcttttttacctgctggtttcttaacaggatttgcatgaagttgttgaactttttgtactgctgtatctttagcagtagttacatcacctgtagtagttgctgcattaatattatttaaaccttcttcatatgctgctctaactggtccaatatcgttacctttttcttcattagtagtctcattattattaagtatttcagttattttattttgcatttcagttagcaattccgctcttgcattcgttttaacatctgttgatgcttgaattgggtcgatggcttgaattgcattatcttttgcagtgtttacgtcatcaattgactgtgcattttcaatattttgattaccttgtgttaattgtgcgtctacttgttgatttgcttgttctttttcttcagtagtcgcatctgcagtttgtgcaataagcgctttttgttcgtttgcttttgttgctaattcatctttcgcaacatctttaattgttgtatctgcagtaataccttgaatatcagcaactgcttgatctttaatttgcgtaacatcattagttgtttgtgcatttaagatatcttgatacgctttttctttagcttttaaaactaaatcttttgctgcatttttctcttcagttgtagcaccagttgtattatcaattgcttgattttgagttgtcacagcttgatcaacatcatttttagcatttgatttaaccgatgttgctggttgcgtgctttgaattgaattctttccagcgtctttcgcctgatctacaccattatcatcagttgcagctgtaatattatttttcgcgtctgtaactgctgttgctaattgttgaatagctgcttctttttcttcagttgtagcgttctgatcattattgataacatttgtttgcgttgcttgtaattgatcaatttcatctttagccgtttgtttcttcacaacttttggtgttaccgcattaatcgctgcttctgcatttgttttagcttcatcaacttgtgcgttagtagttgctgctgcaatggcttgaattgctttaccattttcagtatttgcttctgcatcagctgcttgtttttcttcatctgttgcatctggcgtagcttgaatctcttgcaatttgttatttaaaattgctgtgatttcattacgtgcagttgcttttttattaactgttggtgttacttgatcaatactagtttcacctgtcgttttcgcttggtctacatcattttgactattagcagcttcaatgttgctatttgcttgtgtcacagcattatctacgtccgcattagccgctgcaatttcttcagcagtaatgtcttgcgtttgagcgattgctgttttacgttcattcgctttcgtagcaattgcttctttcgcattatctttagttgttgttgctggctgaatcgcttcaattttagcaatttctgcatttttagccgcttcaacttccgcatttgtatgtgctgcatctattgctgcatcagcagtcgttttttcagtttggacttgttgtttcgcagctgctttttcttctgttgttgaaccgttattagcatcaattgctttttcttgagcttgtactttatctgcaattgcttgtttcgcttgaggtttaacatttgcatcaggtgtaatggctgcgattgtagcttcatttgtagtttttgcattatctacatctgtatttgctgcagcattatctatatcagcgtttgcagacagaacagcttgatcaactttttctttcgctgcttgttgttcttcagtagtcgaatcattcattgcttcgattgctgttttacgttcacttgctttttgagcaatttctgctttagcatccgatttcttagttgtggcagcttgaacttgattaattgcagcaataccattgtctttagctgttgttacagcactgtttgtatttgcagcatcaagatttgttcttgcttcttgctttttagtatctaattctgtatatgcagcttgtttttcttctgtagttgaagcattgctattttgaatttcttgtttacgtgtattatatgcgttttctacttctgtatcagctgcaggtttaacttttgcttgtgtttgaattgcattgattttatctaatacttttgctttagtatcagccacttcttgttgtgatttaacaacttggatgtcatgtaaaccttctgtttgagctgcatctactgctgcatttgcctctgctacttcttcatcagttgcatttgaaactgtagcattttgcgcttttctagctgtagctgcttgtctaacttctttataagcatccattttagtttgagttgaatccgtaatattctcaattttgaatatttcttcgtttttaacgcgttctaaatcttgtgcagtcgttgtcgcttctatcgctttaacacctgaaactttagctgcattaatacgttcaattgcttccgctacctcttcatttgttgtatcaggatttaaaggcgcttgatcaatttgtgcttgtacaacttcatcaaattcttcaagagctgctgctttggctgttgttgcaggtgcagtttgattaatatcattgattgcttttgttttaatggcttctacttgtgcatttgttgttgctgcatcaatatctttaattgcctttgtttcaattttaccaattttatcatttgctacatctttttcatcttgtaatgatgcatttgactttttaatttgttgtttacgagttgtaactgcttggataatatcttgtttcgcttgaggtttaactgttggtgtaatcacatcttgttctaacactgcgataccattatctttttcagttgtgacaccttgtgatgttgtttgtttattaatttctgcgattgcattatttttatcattgttaattttagtcacaagcgctgcaacttcatcttgcgtaacttttttactttgttgtgctgctgtaaccttttcttgagctttagcatctaattcagcaattgctgcttgattatcaattaatgcagcttgtaatttagttactaaaccgtcaatatccgcttgagatgcacgatttgcagtttcaacgtgattcgcatcttcatttaaaatagtgtctgcttgttgtttaagtttattgtattctgcaattgatgctgttgtgtaatgactattatcaacttgtgagtttacttgttgttgcaacgcatctttgttcatttcaaccgctactgaaaatggatctgcagttagtgtaacttctggttgcgcattattaattacaacatctgaagcagtacgatatgttaatttttcattaaaatcaatatttttaggtgtatcgatattcgcaacattaactttatatgataattttaaagatttatctgggaataaaacttctttagtgtgtgtaccacgtgccgttgtcacaccttggcttgtaaatgtaactttatttgcattttgatcataattaacagtcatatttttcaatactgtactgtcttcattaccattagggaatgttgtagttaatgaatcattaacgtaagttacaccttgtggtaatgttacttcatatttaaattgatctgcttttaatgaagcaccaaaattaccattgttaccgatttcagtattaatagtatattctttattgttagttgctttcggtgctaaatctctatttttgacatataaatgtgatcctgagaatagacctacattatcaatgaatgaatagtatttataaccatctttatttgttgtaattcttgaagcatcagcaactgctgtattgtcaggaataaattgtaaatctaaacgatcagcatcagttggtactttaaataaatgtgcagtaccagtcttagcaacatttacagttgctaattcagtatttttcttagcatctttaataactaaatttgttgcaccttgcttactattcgtttgcatagtagtaaagttaataattaattctgaatctggttttacatttacagtttttgaaataccgttaaagttaccatgatctgtagaatcatttgcattcacacgacctaatgcagccacgtttcctttagcttgatagttttgagggttattcttatcaaacatatcgcttcgtcttaattctgagttaacgaaaccaatcttaccgttgttaattaatgaataaccatttactttatctgtaacagttacagttggatcctgtctattctcatctgttgatatggcaggatcatcaaacgttaatgttgtattaatactgccttcaccagtattgctagcatttggatcttgagtttgtgcgtttgctgctacaggtgctgctggttgcgctgctgctggagcattcgctggctgtgtttgatttgccggtgttgcttggttatttccttgtcctgcttggtttgccggtgctgcttgatttccaggttgtgcttgtgcagcgttatttggatcagcttgattaccttgtccagctggttgtgctgtacctgctgccggttgtgctgcgcctcctgctggttgtgctgcgcctcctgctggattagcctgtccaccttggtttgctggttgtgctgctggttgtccttggttcgcaggtgcagctggttgtgctgcaggattagcttgagcaccagcatttgcgttaggctgtgcattggcatcagctggttgtgctggttgattttgtgcaggctgattttgctctgctgcagacgctgttgtcgggttagtagatataaaagtaacagtggcaattaaagctgaaaaaataccgacattaaattttctgatactaaatttttgttgtctgaataaattcattaagtcatcctcctggttgattattctcgctgttaaatgatttcacttaatcaactgttaagataagtagtagcatctgcgttaaaaacacaaagcaactctatctaattaaaattaattttatcatcattatatattgatcaccagtgtattttatattacatattgattactttgtttttattttgtttatatcattttacgtttgtactataaattatttctagaaacacaaaaaaaccgatgcatacgcatcggcttatttgtaatacagtatttatttatctaatcccattttatcttgaaccacatcagctatttgttgtgcaaatctttcagcatcttcatcagttgctgcttcaaccatgacacgaactaatggttctgttccagaaggtcttactaaaattcgaccttctccattcatttctacttctactttagtcataacttctttaacgtcaacattttcttcaacacgatatttatctgttacgcgtacgttaattaatgattgtggatattttttcatttgtccagctaattcacttagtgatttaccagtcatttttattacagaagctaattgaataccagttaataaaccatcaccagttgtattgtaatccatcataacgatatgtccagattgttctccacctaagttataattaccgcgacgcatttcttctactacatatctgtcgccaactttagttttattagatttaattccttcttgttcaagcgctttgtaaaaacctaaattactcataacagtagaaacaatcatgtcattattcaattcttgatttttatgcatttcttgaccaataataaacataatttggtcaccgtcaacgatttgaccattctcatctactgctatgattctgtctccatcgccgtcaaatgctaacccaaaatcactttcagtttcaactactttttcagctaatttttcaggatgtgtagagccacatttctcattgatattatatccatctggactacatccaattgtttcagtatctgcttctaagtcaccaaataagaatggcgctagtgatgatgttgaaccatttgcaccatctaaaacaattttcaaaccttcaaagttaacatctactgttgattttaaatagctcaaatatttttgtgccccttcaaagtaatctgaataatgtacaatatcattgccaactggtcttggtaattctgggttttcttgatccaataatgcttcaatttcattttcttgttcatctgatagtttaaaaccatctgatccaaagaatttaataccattatctgcaactggattatgagaggctgaaatcattacacctaactctgcacccatatcgcgtgttaaatatgcaacacctggtgttgaaataatacctaatcgcatcacttctgcaccaattgaaatcaaaccagctattaatgctgattctaacatttcacctgaaactctagtatcgcgacctacaagtacacgtgggtgtttttcacctttattatgtgctagaacatagccaccgtatcttcctaatttaaatgccaattcaggtgttagttcttggtttgcgacacctcttactccgtctgtaccaaaatattttcccattgtttactctcctttaatttagctatttattttacatttatataagccttcgtttcacttggttgtgctttagtgacatgttctggtaaattgatttttacagtcttttcagttgattctgaaataccatctaaatctacttctgcatcaacttcgcttatattttgtaagtcatctcgactaccgaagatttcaatttctttatcttctaaatcaatcgaacttaactctttatcatctgctaaactacctttctgtttaacatttactttaacctttttgctaaaaggctctactttaacttgtaaattcacttcattaggttgaatcgatacatttaatttattcagttttttatcaaaagccgttacttctgcgacatcttttgtgtcaccattaatctttttattagttttaaaagtggcttttaaataagcgatatcattcaattgttcttctccacctgttactttaactgtttgtggtgaaacttcttgctttgtaattttataaagtggatcaatatcactctgacttacatcaggttgaactgtcatctttttagttactttgttttcaagcgtaatatttgctaatttaggttttacagaataatgaatgtcatcagctaaccctttaacttgatacttctcttgatattttccagctttagcatttgataaatcaatcactactcttaaatcttctggattttcaatttttattatctttgattgtggtcctgaaatagtcacattaactgtttcaggcgcttttgttaaatgcaaatctttagtgttataaagaatttcaacgggtacatcttgaatcgttttactagacttttgaccaagattaccagtgttaaagatatttccaaaaacattgttaacagataaaaagaaaaacaatgccaaaagaaaggcaataaatctcaagccccatttactttctagcatattatttcacacctttcttttgaaagcgtgtgccaaaccaatgttcagcaagcaactcttcaaaaatttcgtttgaaatgtctcgtcgtaattttccatcaaatgttaccgaaatatcaccagtttcttcagatacaataacggtaaatgcatcagatacttctgaaataccaaccgcagctctatgtcttgtacccaaacttttagatatcttaggactatcagacaatggcaaataacttgctgctgctgcaatcttcgtgccttgaataatcattgcaccatcatgtaaaggtgtgttaggtataaagacattaattaaaagttcttgcgaaatatttgaatccattgcaatacctgtttcaatataatcttgaagacctgtttctttttcaaagacaattaatgcacctatacgtcttttagccatatattgcacagcctttgaaaccgattgaatcaatttctcttcatctttactatacgtattagaagtatagcgttttaaaaagctacctctaccaagttgttctaacgcacgtctaatttctggttggaatattactattaaagctaataccccccattgaataacgatatcgaataatttagatgttgcagtcaagttcaatatcatacttatctgctgaccaataacaattactaatatccctttaagtaattgtatcgctttagttcccttaaagaccgtgatgagaagataaagtacataccaaactatcagtaaatcaaggatactcgttacaatttttaacgtactgaggttttgaaaaaagttggaaaaatccataacatctcctccgggtaatatttttccataatacccattataccaatcatttacatcactgtcatacgaacatatatttaaatagaaaaaatttattttaaagattataactactcttaatcattttagtgaattaaaaaaagtagtgcaaaaagcaaaatatactttatacactacaaatcatttatttataataaagtttcaccaaaaaatgttccaactaatgaaaccgcttgttcagcagtatgattattactgtcaatcaatggatttacttcaactaaatccattgaggaaattaaatgtgattgatgcagtaattccaatgcaaaatggctttctctataactaagaccacccaaaactctagtaccagtgcctggcgtttcaagcggatctaaagcatcaacatctaaagataaatgaacgccatcaacattgcgtgacttcaaatattctattgtattttcaattacttcctttatccccaatttatcaatatctgacatagtaaatgttttaatattatgatctttgataaattgtctttcacctttatctaaatctctcataccaattagtacgatgttttctggcttgattacattactatttaattctaaaagttctttgggaccttcgcctgtcaaaatccttagaggcataccatgaatatttccacttggtgactcttcaggtatatttaaatcaccatgtgcatcataccaaataacacctaaattattataatgtttacttattgctgatactgaacctaccgcaatagaatgatctccaccaagaactagaggaaatctgttattttcaattgatgctgaaacctctttatttaatttttgattaacatctataatttcatcataatttcttaatcctttttgttcactatgaaatttttcaatgttcacaacaggtaccttaatatcccccttgtcatatacatcaaggtctaattgctttaatcttgaaattaatccagcatatctaattgctgttggtcctaaatcaacacctaattttctttgtccaaatgttgatggtgcacctataatatcaattgcttttgtctttgtcataagcgtccccctttgctctatgtaattaaagaataatgtatgcgcttaccattatcaagcaatagctacacatataatctgtttatcttattacttcataaaaaaaagcacttcccaaaaatggaaagtgcaagtagtgagccatagaggattcgaacctctgaccctctgattaaaagtcagatgctctaccaactgagctaatggctctaatggctgggctagctggattcgaaccaacgagtgacggagtcaaagtccgttgccttaccgcttggctatagcccaatatatagatggtggaggggggcagattcgaactgccgaacccgaaggagcggatttacagtccgccgcgtttagccacttcgctacccctccagcttattcatataatttaataatcaaaatggtggagaatgacgggttcgaaccgccgaccctctgcttgtaaggcagatgctctcccagctgagctaattctccaaaataatgactcctacgggactcgaacccgtgttaccgccgtgaaagggcggtgtcttaaccgcttgaccaaggagccatggctccacaggtaggactcgaacctacgaccgatcggttaacagccgatagctctaccactgagctactgtggattaatattatgcctggcaacgttctactctagcggaacgtaagttcgactaccatcgacgctaaggagcttaacttctgtgttcggcatgggaacaggtgtgacctccttgctatagtcaccagacatatgaatgtaatttatacattcaaaactagatagtaagtaaaagtgattttgcttcgcaaaacatttattttgattaagtcttcgatcgattagtattcgtcagctccacatgtcaccatgcttccacctcgaacctattaacctcatcatctttgagggatcttataaccgaagttgggaaatctcatcttgaggggggcttcatgcttagatgctttcagcacttatcccgtccacacatagctacccagctatgccgttggcacgacaactggtacaccagaggtatgtccatcccggtcctctcgtactaaggacagctcctctcaaatttcctacgcccacgacggatagggaccgaactgtctcacgacgttctgaacccagctcgcgtaccgctttaatgggcgaacagcccaacccttgggaccgactacagccccaggatgcgatgagccgacatcgaggtgccaaacctccccgtcgatgtgaactcttgggggagataagcctgttatccccggggtagcttttatccgttgagcgatggcccttccatgcggaaccaccggatcactaagtccgtctttcgaccctgctcgacttgtaggtctcgcagtcaagctcccttatgcctttacactctatgaatgatttccaaccattctgagggaacctttgagcgcctccgttaccttttaggaggcgaccgccccagtcaaactgcccgcctgacactgtctcccaccacgataagtggtgcgggttagaaagccaacacagctagggtagtatcccaccagcgcctccacgtaagctagcgctcacgtttcaaaggctcctacctatcctgtacaagctgtgccgaatttcaatatcaggctacagtaaagctccacggggtctttccgtcctgtcgcgggtaacctgcatcttcacaggtactatgatttcaccgagtctctcgttgagacagtgcccaaatcgttacgcctttcgtgcgggtcggaacttacccgacaaggaatttcgctaccttaggaccgttatagttacggccgccgtttactggggcttcgattcgtagcttcgcagaagctaaccactcctcttaaccttccagcaccgggcaggcgtcagcccctatacatcaccttacggtttagcagagacctgtgtttttgataaacagtcgcttgggcctattcactgcggctcttctgggcgttaaccctaaagagcaccccttctcccgaagttacggggtcattttgccgagttccttaacgagagttcgctcgctcaccttagaattctcatcttgactacctgtgtcggtttgcggtacgggcacctattttctatctagaggcttttctcggcagtgtgaaatcaacgactcgaagacacaatgtcttctccccatcacagctcagccttaacgagtaccggatttgcctaatactcagccttactgcttagacgtgcaatccaatcgcacgcttcgcctatcctactgcgtccccccatcgattaaaacgattataggtggtacaggaatatcaacctgttatccatcgcctacgcctgtcggcctcagcttaggacccgactaacccagagcggacgagccttcctctggaaaccttagtcaatcggtggacgggattctcacccgtctttcgctactcacaccggcattctcacttctaagcgctccacatgtccttacgatcatgcttcaacgcccttagaacgctctcctaccattgtccaaaggacaatccacagcttcggtaatatgtttagccccggtacattttcggcgcagtgtcactcgactagtgagctattacgcactctttaaatgatggctgcttctaagccaacatcctagttgtctgggcaacgccacatccttttccacttaacatatattttgggaccttagctggtggtctgggctgtttccctttcgaacacggaccttatcacccatgttctgactcccaagttaaattaattggcattcggagtttgtctgaattcggtaacccgagaggggcccctcgtccaaacagtgctctacctccaataatcatcacttgaggctagccctaaagctatttcggagagaaccagctatctccaggttcgattggaatttctccgctaccctcagttcatccgctcacttttcaacgtaagtcggttcggtcctccattcagtgttacctgaacttcaacctgaccaagggtagatcacctggtttcgggtctacgaccaaatactaaacgccctattcagactcgctttcgctacggctccacatttactgcttaaccttgcatcaaatcgtaactcgccggttcattctacaaaaggcacgccatcacccattaacgggctctgactacttgtaagcacacggtttcaggttctatttcactccccttccggggtgcttttcacctttccctcacggtactggttcactatcggtcactagagagtatttagccttaggagatggtcctcccagattccgacggaatttcacgtgctccgtcgtactcaggatccactcaagagagacaacattttcgactacaggattattaccttctttgattcatctttccagatgattcgtctaatgtcgtcctttgtaactccgtatagagtgtcctacaaccccaacaagcaagcttgttggtttgggctcttcccgtttcgctcgccgctactaagggaatcgaattttctttctcttcctccgggtactaagatgtttcagttctccgggtgtgccttctgatatgctatgtattcacatatcgataacatgacataactcatgctgggtttccccattcggaaatctctggatcaaagcttacttacagctccccaaagcatatcgtcgttagtaacgtccttcatcggcttctagtgccaaggcatccaccgtgcgcccttaataacttaatctatgtttccatcctacaggaaacgcgttattaatcttgtgagtgttctttcgaacactagcgattatttcttatgaattcaagcttatttaaaactctttattcactcggttttgcttggtaaaatctatattttacttacttatctagttttcaatgtacaatttctttttagtcaagcgctcgcatactgctttattttcaaaaaatcaaatgctcatttacaaaagtaaactccgctttaatttttcttaatgcattgtctgacaaccgctttctttaaaaagaatagattgtcaagcgctcgcataagcaatatcactttaaccaaaaaatatttgaatgttaaataaacattcaaaactgaatacaatatgtcacgttattccgcatcttctgaagaagatgttccgaatatatccttagaaaggaggtgatccagccgcaccttccgatacggctaccttgttacgacttcaccccaatcatttgtcccaccttcgacggctagctcctaaaaggttactccaccggcttcgggtgttacaaactctcgtggtgtgacgggcggtgtgtacaagacccgggaacgtattcaccgtagcatgctgatctacgattactagcgattccagcttcatgtagtcgagttgcagactacaatccgaactgagaacaactttatgggatttgcttgacctcgcggtttcgctgccctttgtattgtccattgtagcacgtgtgtagcccaaatcataaggggcatgatgatttgacgtcatccccaccttcctccggtttgtcaccggcagtcaacttagagtgcccaacttaatgatggcaactaagcttaagggttgcgctcgttgcgggacttaacccaacatctcacgacacgagctgacgacaaccatgcaccacctgtcactttgtcccccgaaggggaaagctctatctctagagttgtcaaaggatgtcaagatttggtaaggttcttcgcgttgcttcgaattaaaccacatgctccaccgcttgtgcgggtccccgtcaattcctttgagtttcaaccttgcggtcgtactccccaggcggagtgcttaatgcgttagctgcagcactaaggggcggaaaccccctaacacttagcactcatcgtttacggcgtggactaccagggtatctaatcctgtttgatccccacgctttcgcacatcagcgtcagttacagaccagaaagtcgccttcgccactggtgttcctccatatctctgcgcatttcaccgctacacatggaattccactttcctcttctgcactcaagttttccagtttccaatgaccctccacggttgagccgtgggctttcacatcagacttaaaaaaccgcctacgcgcgctttacgcccaataattccggataacgcttgccacctacgtattaccgcggctgctggcacgtagttagccgtggctttctgattaggtaccgtcaagatgtgcacagttacttacacatatgttcttccctaataacagagttttacgatccgaagaccttcatcactcacgcggcgttgctccgtcaggctttcgcccattgcggaagattccctactgctgcctcccgtaggagtctggaccgtgtctcagttccagtgtggccgatcaccctctcaggtcggctatgcatcgttgccttggtaagccgttaccttaccaactagctaatgcagcgcggatccatctataagtgacagcaagaccgtctttcacttttgaaccatgcggttcaaaatattatccggtattagctccggtttcccgaagttatcccagtcttataggtaggttatccacgtgttactcacccgtccgccgctaacatcagagaagcaagcttctcgtccgttcgctcgacttgcatgtattaggcacgccgccagcgttcatcctgagccaggatcaaactctccataaaaattatgatgtttgattagctcataaatactaaataatgtttgtaacttatagttacgttttttggaattaacgttgacatattgtcattcagttttcaatgttcattaatgttcaatctcttttattctacttcatttatttcttgaagtcaataactttttgaacgattactttatttattctatattgtttttatagttatttcaatggtaagttttacacttttgaaattcttctttaaaaacaactgcgtcgtttttgacgactttatcatattatcaactttggaatttaaagtcaataacttttttaaaactttttgtgttcacaacccgcttctttttcaacgcgtttattgcttaacacaagaacttattttaccagcattccaaaacaaatcaacataaaaacgtacaaaataaaagtaattttgtacgtttagcatatattatacctatttatttgtagcagctataactttttgtgcaatcgagctataaattttacctagacgatcatctgattgatatattgacggtgcaaaatcttttggattccaagatggttgctctaaaggtaattccccaagtaattgagtattaagttcatcagctaacttagtaccgccacctttgccaaagacatattctttattacccgtctctttactttcaaaataactcatgttttcaattacgccaagaatagaatgatccgtatgttttgccatcgcacctgcgcgagctgcaacaaatgctgctgtaggatgaggtgtcgttacaataatttccttacttgaaggtaacatcgtatgaacatctaaagctacatctcctgttccaggtggaagatcgagtattaaatattcaatgtctccccatttaacttctgtaaagaaattcgtcaacattttacctaacattggccctctccatataactggcgcattttcttccacaaaaaaggccattgatataactttaacgccatgacgttcaactggaattacttccttccctttaattccaggcttttcatcaatacccatcatatctggtacactaaatccatatatatcggcatctactaatccgacttttttcccttcacgagctaaggcaacggctaaatttactgcaacagtagatttaccgacaccacctttaccggaggctattgcaataaattcgactggattattttgagataataggccttctatcgttttaggtttattttcttcttttggtttaaattgatttactttttcttccggcaatgtttcaaatcgtataccgaccgttttcgcaccgttttcttttaatgcattaacaacagccatctgtaaatctaattgcggtgcaccacctaattgtgccattgctaatttaacactcacatgttctttttcttccttaatagaaacttcaacaataccttctgtttcttttaaaggcacatctataataggatctttaatttctcctaccaattctttcacttgatctaccgttaacaaagcaaatcccccttaatcattttaagacatctacatcatagcaaataacaatttttgcttagtctatcactaaaagtataaaactttttattaaataaaaaaagcagttagcctattattttaaatagaccaactactataattattttaaaatttccttctattactttctatttctttaggttctcttataaaaagtgctatcacataagctgccataacaagcacagctacaaaagcaaatgagatatccacccctatagcaatggattgctgtttaatttcagttgcagttaaatgcgatggcgatgtagataaaaatatttttgcaccaaaactcattaatgtaaccattaaagctgtgcctagtgaaccagccattacacgaccaaagttcataatagccgtgccatgtgagatttcttcatttctcaaagaattaattcctgtagtatttatcggcatcatgagtaaagaaactgaaaacattctaattgcatatacgactattaaatacgtataagatgtgtctgtatgcaagaaacacaacataattgtagtaattgttaaaattgtaaaaccagtataaatcaatggtctaggaccatacttatcataaaatttacctgtaaaaactgacataataccatttattattgcaccaggcatgataacaagtcctgataacaaggcagataaagataaactgttttgaacatatagcggtataagcagcgcaggtccaaccattgacatcattataatcattgaactaatcgtacataatgcaaatgttctatttttaaaaacccttaaatttaaaagtgcattagtaatattaaattgtctacgtataaataaatagataataaccatacttattatcaacgcacctattactattggacttgtaaatcctaaatctcctgcactactaaatgcgtatagcattaacccgaatccaatagttgaatacattactgagcgcttatctaatttcgtatatttcacttcattgtaacttgagattgaaactaagccgaaaacaaaggcaactaaagcaattcctacaattataataaatggtactcgccaactcgcttgatcaataattaatcctgtaactgtagggcctattgctggtgcaaattgaattactaaacctgctagtcccattgcaaaacctcgatgttctttactgaacaatgtaaataacgtaaattgcattaagggcataagtacgcctgcacccatcgcttgaattacacgtgctaacattaaaactccaaaattcggagctaaggctgcaacaatagaacctaataaaaatgtccccatcgccgctaagtataaaggtctagttttaattctatccattagatatgccgtcaaaggtatcatgacgccattaacaagcataaacccagtaactagccattgcgatgtactttcattaatatttaattctctcattatactaggtaacgctgtatttaataatgtttgatttaaaatagctacaaacgcactaatcaacataacagcaactatgaagtttcgtctccgggttgttaattcaactttagccatcataattcctcctttttaaaacagatatacacttgtccctttaatacatatagccattaacataatgggagtagtactcaaatgataaagaagcactacataataaatcattattggttcttacacattaggcacagctaatgtgtacttaaaaaactaacaatataacattgtagggcctaataatttattttatttctcagactcatacaatggttatttaacttatttaccacaaattgagcactaagactcactattatcgattcttctattgaacaaaaagaagttggaacacatatgtgccctcaacttcagatatctattttctattatttaaatttttactttcagggtaaaattgaagcttacaaacatataagaaccctataataaccatgatgacccaaaaatcgatattgatatacacatagttcagatgaataataaaataaaataacgttgttgcaactgtgtaagaaatcaaatgaaaagtcgcgcctctaaaatatgcattttcaggcaacatttttctaaaataatccattaaatgctcgactgcaaatatgatgaagtacccaaagattatataactgccataatataataggttatcgtacatacttctattatatgtaaagtcacccaacctaaaataaataagtattctacttaatccatataaaccaaaccctagaaatgttaaaaaaatcgcaccagaaagtacaaaaataaagagaacaaccattgtagttaacaagttataaaacttatgtttaagataattcacaatcattggcctccttattaataaaatattgaacgatttatctagtatctaggaaatttattatttcttactttaattacactacatcaattttaatcataattctattcttttgattgagatgactgttctttaaaaaatacgacccataaaacaataagcccaatgctaattacagcaacagcacttaacacattatgtaagtttggaccaaagattcctgattgtatcgcataaagatatcccattattgttgaacctattgatgccccaagatttttagttaatccataaaatgacatcattttcttcatttgtaatgggctagtttcctcttggacaattacactatctttcgtataaatatatccaaaacttaatcctgccaaaatcaacacaaatgctataagtaccggcaatttaataccaaatgaaatgataatactacttactagtagcaatgtaaatgatagtaagtaaataactttccttgatagttttgcttcaattcgatgtaaattaaaattcaatgtaatccaagctaaagataaaggaaaaataaccaatccactttgcaatggagataatcctagttgttcttgaaggtagactggaatatataaattgaatcccattaaacaaatagctgttagaaggtcagttataaaaactaaagtaatcgaacgattaaattcaaccacaggtaaaaatggtgaagaaacatgtttttctactttaaataaacacattgccacaacgatagctaagataaaactcaagaaatttaaaagtaacagctgttggtttaataaagcaaacataatcaatccaataaatacataaaatagcgtgagccctttagtatcaaattttgatttagcaactgtttcttcctctggaaaatgaaatgtccatataactaatataatggcaatgatcgcaatcggtatatttatgtagaataaccaatgccatgttgcaaattctaatataccaccacctagaagtggcccaatgatactcgaaataccccaaacactgccaactatgcccataattttatatcgtaacggaatttcaaatgctaactttggaacaatttgcgataatgacatcaatacacctgatccaaaaccttgtatcacgcgtgatataattagcatagtaaaattagtacttaaaccacacataaaactacctatactaaataaaagtaatcctgcaattgccacataaataattttaaatctcgaaagtaattcgcccactataggattggcaattactaatgcgataaaatacgctgtgaaaattaatgaaattaaatttcctgcatttaaatcttgtttaattgtaggtaatgcaagcgaaataatagatgattcaatcgctgacataaacataattaatattaaagctataacagttatgattgactttaatcgcatgaaatacctccttctatatatttatttataagattttatttacaaataattggttttcatatgtataaacacttttgactttcaaatcttaacgataattctattacaatacaatcccctattagaatgatttatgtaataaaaaaagcggagtttcccccagcttttctaaacgactacataaaatataagattgcaattaaatgcaatagtgatgctattacaataaaaatatgccaaatcatatgaaaatatggtctattcttttgtgcataaaaccatgcaccaattgtataagacacaccacctaagaaaatgaataatatgaatatccatgatgtgcgaataaaaataattggtaacaagataatacctacccagcccatcactaaatagacaattaagcttaacttttggttaactttgacagctatggatttatataaaataccccaaagtgtcgttccccataataaaataaatactgtccaacctatccaaccacctacaactgttaacaaaataggcgtatatgtaccagaaattgctacgtaaatcatactgtggtcgataatccttaaaatatatttatgaggtgtttcattttgcatagaatgataaatagtagatgaaataaacatcataaagatagaaataacataaatagacatactcacagacgcaagcgtaccatgtgcaatataactgtgcacagccgcatagggtaacactaataatgttaacaaagctgcaacaccatgagatgccgcattaccaatttcttctccaaatgataaagggatgatatccttaaatgtttctacgattgtgtcattactttttttagttgatttggacatcatagtcaccgcctatcattaaattaaacccattctacgtaaatcttctgttgcagttgcaacactatctttaccttctttatttttaagaggtgaaaattcttcttctctaggaacttgtaacgtgacaaaactagttccataagtaaatatgtcaaaatagaacaattcgaattttaaagttggttgttcaataaccccaaagttctcatctaattgtttcaaattcttaatagctaaatgataaggtaactcacgatttacagcgtttaaaataaaaccaagtttaaatgcatgaataccgatattagcattgttaaattgatttgcaacttctggatctaattctgaatactccagtactgtatctttacaatcgacattaactaaacgtccaacactttcaactggttttggttgaatcgttttagaagtaatatcgtaatcatgttctaccgtaaatcctgcaaatagtggatccaacacttttactaaaacattgtcgatattattcaagaaaatatacttaacgccattattagacatttcttctaagtatcctgccttgtctaaagatttaaacacgccaccattaccattcggcgtttccataatacgaccctgttgatttaaaattaacttcccttcttcactaagcgccacaatattatcttgtttaaagaaatggattgcttcttgatcatatccaaaataactatgtgcttcgaaataagctaaagtttcttcatgattgatatcacttgtcataatataccattgaatcgtatgtccagattgatgattcaatgtttttaattggttagcttgaagttcaaataaacttacaccttcaatttcaaacgaacctttagggcccttgtaaccaagtcttgttccttgaccacctgccatcaaaagtactgcaaattgtccttctttaatagcttgaagtccttgttcctctaaacgcttaatctcatcatcactcatttgtgatttaatatcatatttcacttcagaaactgcagatacatcatctattgttttcttattgatgtataaatcgttatataatttggcaataaaatctaaatctaatgacgctaccttctcttcaagtgcttctttttcattgttactcattattttttcatattcacacaaatgatcttgtttatatttagctaattgatttttatctagcattttatgcctcctgctgagtttgtaacctttaataatttattttctataaaaacttagtattccagttgcttattatatcattgatgaaaggctgaaataaaacataaactgttccgaccattaacgctgtagctaaagataagtctacaagtccacctgttttaaattgaatcggtgtcttcacattaaacggtaacggataaaataatttcacgcctcttggtgttatcatatctagtataacatgtgacactaacccaattataattgctgccatataataattaggcgtctgaataatttgcaataaaaatgctatgattgcgataaataatattgaatgcgtaaaggttcgatgtccaaagatcaatctcacaaaaaaactaattaccttaaaccttctgccaatcttactttgagtgtgacatatatcgggtaataagctagctagagttgctagaatgataaccgtaaccgacgaaaaaatatccgtttgaaaatattgtgttgttagcgctccaacgagcatgccgcatgaagcatgtgttttacctgtcatatttgttctcctttaatactcacattttaccacatccctaacaaaaacacgaacatattttcgggttaaaattcattagtatgacacaatttaaaaaagtatcacataactcttgaaaacgattacaaaatcgtttatgatgtatttacaaaatatttaaaggatgtgtttgaataatggcaatgacagtaaagaaagataataatgaagtgcgtattcaatggagagttgctgatatcaaaattcctacaagtgaaattaaaaatattacacaagaccaagatattcatgcagttcctaaattagacagcaaagatgtatctagaatcggctcaacgtttggtaaaacgaatcgcgttattatcgatactgaagaccacgaatacattatttatactcaaaatgatcaaaaagtttacaatgaattaactaaataaattgtataaaaaaatcattcatggtgagggcttcatgaatgatttttttaattgattcaacacccagcaaaaacaaatacaaaaggacaactgttctcataattttaacagttgtccttttttcacatatatttataacaaaagatgtgccatcaaagaaataattggtagtgtaatgattgttctaatcaagaaaatcataaacaatttgccgatgcttacaggaatcttcgaaccaagtatgacgccacctacttcagacaagtatattaactgcgatatactaagtgccccaataacaaaacgagttatatcattttgtacaccttcaattaaaatagaaggtaaaaacatatcggcaaaaccgataataatcgtttgagaagcctgtgccgcttcaggtatttgcattaactctaaaaatggaacaaaaggtttacccaatatgacaaaaaagggcgtgtagttcgcaataatggtagcaatagtaccaatactcatcactacaggcaaaataacaaaccacatatcaatgactgtttttaatcctgacttaaaaaagtcaataacgcccggtgctttaataccaacttctgttgcagtatcaaagccatgtctcaatgccgtctttccttctggcaatgcctcagtacgcgcactttcaggtacctccttagcatactcatcaggaattttatttaaaggccaaattcttggcataatgactgctgcaacgaggcaggatactatcactgataaatagaaagcaaaaaattgattttgcatgtgcactgtttcagcaactacaattgcaaaggtgatagaaactacactaaatgtcgttgaaataactgttgcctcacgacgagaataatatccttcaccatattgtctacttgtaattaagaccccaacagttccgtctccaataaatgatgctaaattatctaccgtcgaacgtcctggcaatgtaaataaaggtctcataaccggtctaaaaataggacccaacatctctaacaaaccgtattccatcaatagcggtaaaaatagagctgcaaataagaatactgccactaatgttggcaataaacttgagaacaataatccacccgtttcatctgagtaaataacctttgaaccaattcgtaaaaatgtcatccatgcaaaaacaactgctaatattcgtaaaattaaccaaccaattctaacgttaaaagcattgttcattagcccgtcaggtttcaatttatcttttaaaatagttgaacaaatcagagttatgatacccgataaagtaattatcgtcacaattaaaaatggcattacgccacctaatacatctttaagcacgcctgctaaaaatgccacgggcaacgttgtttgcttctgtccatcttgttcgactggaattggtactaaaaataataagataccaattaaagacatcgtaataaacttaagtctcccaataactatctctttccttgaaaagctatccataaaatcaatccatttctctatgtattcgttttaagtatatacagaattctattcagttaacaaacatattccttatcattctatcttttaaaatgtttatgtatgcaaaataatgaataattacagttattaaatatacgctatttcttgtaatttttcaagatgaattcaaaaaaggttaagtacaattactgatttcgtacttaaccttttttaaactctaatcatatgttagttatttcattcttcgtaataatattaagaagtatggtgcaccgataattgcaatgataacccctacaggaatatccagtggcggatgaatgccacgggctaaaccatctccaaatgttaacaatatagcaccaattaaccccgacataataataacgtgtaatgttttatttcctattaattgtctcgcaatatgaggtgcaattaatcctaaaaagctaataccaccgacaactgaaattgcggatcctgctaatattactgctaaaattagcaatagcattttaatagttttaacttttaaaccgagtgcggttgcaacagcatcacctagattcaatacatctaattgataactcaataaaatgatgattggtatcgttattaaaaaccaaggtaatatagtataaatattcgacatatcatgtccatatagactacctgtcaaccaaacaagcgctttgtttgcttccagtggatttctgattaataagaactgcacaatcgccgtacatattgcgcctattgctaaaccaattaaggcaagctttgaacctttaacatcatattttgaaattaaaaatgataaaaataaacttactgcaaaggcacctaagaatgaacctataggtaatacaaacaatggtgctgttggaaaggtcataataataatcacagcagctaaactggcacctttagaaatacctataacatcaggtgaggctaacgggtttcttattacagcttgtataattgcacctgaaatagccaagctactgccgataataataccaagtaatgttctaggtatacgatactcatttaaaataaaatcatcttgtgtaaagattcccttaatagcatcaatcggatgaatcatgacagaccctacacataaacttatgaatatactcacaattaaaaggattgtgattaaactataacgacgtataattttcgttgtcatcatattcttttcacccctttaatcgttataaataagaagtaaagtgcacctacgaatgatgtaacaatccctactggtgattcataaggatatgtaattaaacgacttaatacatctgatagtagtaacaaatctgcacctataataaatgttaatggaatcatgactaaataattcttactcacatagcgtttgactatatgcggtacgattaagccaacaaatccaattggtcctgccactgacaccgacatacctgtaagaataatgactaatagtccaatgataattctaactttatttatattttgacccaatcccttagcaatgtcatcgcctagttccattatcgttagttgacgtccaataaaaatcgttacaattaaagcaccaataatccatggtagaatggttaaaatctcatcccacttcatactggataatgaaccgacaagccaaaacatcacttgttcgtttgaattctcattcaaaataataataccttcggtcatactactaaaaaacaaatggatggccataccagccaatgctaatttaatgggtgtcatacctttcgtagcacctgaaagcgtataaacagttaaaccacctataaatgcacctatcacacctaaatataatgcataatactctaatgatggaatgataatcgtcacaaatacaatgaaaaacgatgcaccagaactgacaccaaaaattttaggtgatgctagcggattgcgtgtcattgcttgcattaacaaaccagataccgctaatgcaccgccaataaataatcctgcaatcatccttggcatacgtacattatgcaataaaaacgttgctttcgtatctgtatgaccagtaacatagtgaacgatatcgctaaaattaattttcgaagaaccaatcgccatatttaaatatatacaaataaaaagaaagcacaaactcactatatacgtgagtgttgtgcgtctttttcttttatgatctatggcagattggctaattatttcttttatagccatttacttccaccttacttttgttctttttttgataattcaacaagttctttagccatttcttcagaagaaattaagccacgagatcttgcccaaacgtcacggtcaacaatatccacgcgattatttttaactgcattcaactttttccatgttgcatcttcttgtaacttcttgaattcagcagaatcttttttagcatgatctgtcataatgatcatacgctctggatttaaatcagctaaatgttcagtgtctaattgtaagtaaggtcctttcaaatatttacttaaaccttttgttacatcgtcacttaatgcatttttaaatcctagttcgtttaaaaattgtccaacatatgaatagtttggatgtgctaataaaccagctttagcaactactgctggaagcactttttgatttctatcaaatttaatttcatctttatacttattgattaatttatcatgctcagcaagacgtttttcgccttctttttctttatttaaagctttagcaattgttttgaacgaattaatattttgtttgtagtctccatcaaaactctttaatgataatgttggtgcaattttgtttaattctttattaatacctttatgtctactgctatcagcgataattaaatccggttttaatttactaatttcctctaagtttggctgtttacgtgtacctacagaagtataatccccaattttttctctaactggtttaatgatacgttttttcttaccatcatcagcaataccaactggattaacgtctaatgctgctaatgcatctgcaaatgagtactctaatacaacgatacgttttgcatctttaggtacttttactgtaccattttcatcttttaccgaaatagtatctttagttgatgattcttttttacttgaattatccgtattaccacaagctgcaactaaaagtaaggcaactattaatcccaatatactaaaagtttttagacctctcatcgttccactccttaatatgtataacttcatttattattttattgataacaattatcattgtcaagtagcgttcaatcttttttatattactaaaatgtatgactatatatttcctctagtaattatgactacaattagcacatttccttagaaaaaatattgataatgtatcattgctatatcatctttgcattaatacaattgacaccatttagtatgaccgttatccctgtaatttagctgatattatctgttgcaattttatgtgacgaactgttgcacttaatttgataaatcaacaaatacaaaaaatctaagttgaacaattatgatacaaccgtgcaaacgatatgtagtataacttgtcaacttagacttattgataaatatattaatattggtttaccatagcgggagattttacatcaaaattttgaagtagcgtatcaatctttgaatcatcaatatataccttatgtaaatttttcatatacatcgaatgagaaagtgcttcataatttaatgaaaaagatatatgatctccaacttgatagtgtccttgaccatttaaattaagcattaaatgatcactcgaagcgcctaaaatattgatatgctgatccataggtgaaatattatcgacttttgtatctaaataaccaatatctacaatagcttgtaagaatgattcatgcgtttgtgtattaactcgaggtttaatttctaaaatctcagcctccaatgtaatcgcatcttgatataacatagctatcgcttgatttgtcgttgtatcaacacctctaaacaacgtttcacctattcgcaattcatttattttacccaaatcattatataaaagttgtggtaacatactcgaattaccacctgaaataattttcaatcgatatcctatttctctttcaacagctgagacgaatcgattaatcataaagatatcatcatcacttggcgcatcagatttaaaacacataaaattgaatgctaaacctacaaaatggatatttttcaagtgaataatctctttaatataatctaaaacatcataagtcagaacaccttcacggccatctttccaatctaccattaataaaatcttatgtttttttcctaaaacttctgctacttcatttatttgatgtatggtagataattctgtttggatactcatatcaactttttctatcatatctgaaatctcttttttggcaggcgtacgcaataacgtatatgttaaatcctgatctgcaatactaattatgttatccaatctggattctgcaacatgattgatacctaacgcttttaagctttctacaattgtacggtcaccagctatgcacttaattactggtgtgaattgcatatttttactttgaaaaactgtttgaagtactttggcgttatatttaatcttcgatatatttatgttaacgtgtgccatgtagtactacacctctttttttatcggattatctaactcaatatttaaatattgctttactttattttccattctcatatttaacaacgctttgacagtaattgttggtccaaacaaaatatcttttaactcatttgcatgtggtagtgttgggttaatggcatgcgctactacttgctgtactatgttaaataattcggtttcttcaacacaatcatactgattaaaatgatgaattaattctgccatttgattttgaataacagcatgttggaattttgcaatcactgcatctatagaatcagctattaaactatcatttgtaattttaatatctgatacacgatgttgtaatgtttctaaatcaattctagaaccacctaaatctctcactaaaaattgaatgtcaaaatgtggccccaagttcactactgtattttgcatgtgtgcttctaaagcaattccataattttgaataaaagcaattaaaggcgggattaatgcttgagcgtatcgttcaataaatgtcgtaatactttctttagtaattccttgatttaaccactctaagtaactatccacgataactttttgatctattggatttttattaactagacttgcactaactactgttgcaccttttccatcaatttcaggcttttgtcttataatacaagcaagctgacgtgccctatctttatcaacatttgcatattcaccgaacggttccatagcaactttaaatcctggatattgattcaacatgttttgtaaagcataacttaactttggtccatctacagtagtcacagttgagactgttctaacggcacttgttgcttgtgcatcgacgggcaacttaacatggtatggtttatcaattaaagacatcgtcctaaatgataaagttgcttttgaaagtattgtaaacggcgttggaattaatatttttttagcaatccatgcttcaaaatatttccctatcgtatgatcatattgccaaggatgtactaaaatcgctctatagtcttcacttttcaaacctaaactctttaaaaacacacgaatctgattgtagtattcgggaattatttcatcaataataaattgatcattaccatccatagctgtgcacacaacatgatctttttcaatcatcataatttgcaaagggatttctttttcaaactcaggtgcatatgctcgtacttcttccatagttaagggcaatttcgttttggttaaagggtgtgttggatgcccctctggtaccaagctctcagaataagttaaatcatctgtcttatcactatcttttacatgttgtaaccatgaaaaaaagttaatatcttgtggtaatcttgaaaatttaaaactttgacttattaatgtttgtctgtgagacatttgcttatatgtttcaactaaactatctcgactgtgtattaactcttcgcgtagtcgctctgaaatagggatatcaaagtcatgattcaacacatctaacaaaccttctaaagttataattaatgacgtttcacatttatttaaataagcaatatcacctgtaaactcatagcgttctaatgcactttttctaacaacttcaatagtcaacacatgcatatgatactgaatttcaattaaagatcctttttgcgaaataaatgtttgctcggggtaaatacgttctttaataatggccttaattacacgatattgaatatttctatctgcctttgcccattcaagatataccatgattactttcctccaactttaacttcaactttctatttataaaatagaataccattgtaatgcatatagtacttattcccattattgaaaaagttctaacaatgccaaacacatctgcacatatactcattaatagacttcccaatggaatcatacctctatccatcataataatactcagtactttaccacgttcataatctttaacattattttgaaaataaacgcgatttgtcgtacgtgcccattgactaaataacccaatcaatgtaatacaaatgaacatgatgacaatattgtgaaataccacacctaacaaagcaatgccaaataaaaatgaacttaaataatacatatttaccataccaatatatttaagtactttaggtaaaactagcgttgcaataataccaccaatggcacacatcgtcatagcgataccaaatatttcagatttccccggaaatactttgtttgtcaaaactggtaaaagtgtcgtatatgaaaaacctgtcgccataatcaataatgatgttataaatatttgtcgaccttccatatgtaatttgaagtaatctataataacttttaacggcatgaatcttgttgcatcttcaggtattttagttactttaaaatgtaatggtaagcataataaaactgcgataaaataacaaattgcctgtgcaagaaatgttgttggcgcatgatagactgctaatatgacaccagcaatggcaggccctattgaacgacaaatattaatgatgaatgaatgaaatgatacagcttgtgtagtagatattttatctgataaatctggtaagattgcttgtcttaaaggtgtttcaaccgcacttaaaatccctcttaatgtcgcatatataataatgacgctaattggaattgcagtgaaactatacgtgagcgcacataaaattgcagttactaaaaatgatgatgaaattgtaattctcagcaatcgccctttatcatacttatcggcaattgcccctgcccacacacttagtaataatattggtacaagtctgcaaaaattgacaatccccagataaactgcgttatgataagtggtaagcacaaaccaatttagccctatttgtccaatccaattacctagaaatagtagaaaagaactgctaaaaaaatattttgtcataaaacttacacccgcattctgttgataataagaatcattatcattaatatggattatacaaatctatcttgcttttgtaaaatatttcatagaggtgaattatgaacttgaacttaatttttaaagaacagacattaaaatttaacaaagaagaacaagaaacatatttatttttacaacaacataatagcgattgggctaatgtttttaaagagatgattttacaaggaagagataaagtcactcagagattggtcacatcaatgcatcgcgaaaacttagttaaagcgcgcactcaaagtaagaaaatattgagtcgtgatttgattatgttagatatctcaacgactcatatactagaaatccagttcccacaagctaagcaaacattatatgctcctatcactggagaacacgcctttgatcgaattgatgttgaaggccctttctacattaaagatgacattacaaatacgattacacgagtacaacatccaaatgaaattcttgagtgtattttaattgaagcaccagatttaaaaaatgctgctagtgatcaatttcagcaagatttaataaacagtgcaactaatatgacatttgcaattagctatcaagcactgtcaatgcaacatgattctgcacctttatttaatattatcgaaaatagcgaagatagttacttgcgttcagagcaagccgttattgaaggtcatccgctacatcctggggctaaattacgtaaaggtttaaatgcattacaaacattcctatattcttcagaattcaatcaacctattaagttgaaaatagtactgattcacagtaaattaggccggactatgtcactgtctaaagattatgatacaactgttcatcaactatttccggacttaattaaacaattagaaaatgaatttacgccaaagtttaactttaatgattatcacattatgattgttcatccatggcaattagatgacgtattacattctgattatcaagcagaagtagataaagaattaatcattgaagcaaaacatacgttggattattatgctggtttatctttcagaacattagttcctaaatacccagctatgtcgccacacatcaaattgtcgacaaacgttcatattacaggtgaaattcgtacattatcagaacaaacgacgcacaatggtccactaatgacacgtattttaaatgatattttggagaaagatgtcatatttaagtcctatgcatcaacaattattgatgaagttgctggtattcatttttataatgtgcaagacgaagcagactatcaaactgaacgaagtgaacaattaggtacattatttagaaaaaacatataccaaatgattccacaagaagtcacaccaatgattccttcaagcttagttgcaacctacccatttaacaatgaatcacctatcgtgacattgattaaacgttatcaattagctgcatcattgtctgattttgaatcatcggcgaaatcgtggattgaaacttatagtaaagcattgcttggtctcgtaatcccactagttactaaatatggcattgcattagaggctcacttgcaaaatgctattgcaacatttcggaaagatggtctattggacacgatgtatattagagactttgaaggtttaagaattgataaagcacaactaaatgaaatgggatacagtacatctcatttccatgaaaaatcaagaattcttactgattcaaaaacgtctgtgtttaacaaagccttttattctaccgttcaaaaccatttaggcgaattaattcttacaatctctaaagcatcaaatgattcaaacttagaaagacatatgtggtatatcgttcgtgatgtactagataacatttttgatcaacttgtactttcgacacacaaatctaatcaagtaaatgagaatcgcataaatgaaattaaagataccatgttcgcgccatttatagattataagtgtgttacaacaatgcgtcttgaagatgaggcacatcattatacttatattaaagttaataaccctttgtatcgagaaaataattaaggttatagaattttattaatcgtgagctcaaggattacattaacttattaaatacaatctatacaaatgagagaataatacattttccatattcaaattattaaaaatcacaaaaaagctcggcacttaaattgagtgccgagcttttttatcgaataacttattgtaaaccttgtctttcttggttattgttttcgttatttttttcgtgtttttgtttccactctttttgagtcattacatcgtcaacttgcatgttaacttcaactacatctaaaccagtaatatatttaacttgttctttaactaattcagttactttacggaagatttttggtgctgattcaccatattctaagattacttttaagtctacagcagcttgtttttcaccaacttcaacagatacaccttgagtaacgttgttgccacttgagaatgcattagtgaatgtatcagttaagccacctttcatatctaagatacctttaacttcacgtgcagcgataccagcaattttttcaacaacttcatcagagaatgttaatttgtttttgaattgaggctcctgattttgttcttgttgtttttgacgctcttctctttctttttcgttaacaccagtttgattgtcgtatgcttgttttgctttattgttatctacagtcataatagattctccttttacttgttaatttttatatttttttaattaaattctaaattgatgaattaactccatcgatttaaaaaattcataaaatcttgcttacggtctttcatatacccaatacctacaccaattaaacataaaacgatgataagtactgttttccaaaaacctaacgttaagaataatatcgcgattaatagaaacgctaggaaaccaacgattctccatttaaatacttttaaaaaattaatcacttgttgtgtagagtcttgtccgttttggttatgattgttagccatgatatacctcccttacaacactcgtggaccagaagttttctgatctctcacattaacttctaacttacgtactggcatttctgtgaaatattctacattctttttaatatccgaacgaattgcttcagttaaagattgaacttgaacattatttggtacgaaaaagtcagttttaatgtcgatataagatttattttttttgttatatagtttcgcaactacatttggttgtcttacttgatcatattttgcaaccgtatcgaatgccgtcttttcaacagctttacgagatacgtaaacatgaccatcatcgaagtctttgtataatccaggttttcgatgcgtaggtttgaagatactaaatactaatataagacctattaatatcaatagtgcagcaagtgaaataagtaatggttggaaccattcaaattgaaggaagtagtcttgatattcagttatacgtccatcttggatatacatgaataacaggaaccccacgattactactattaataagccaaggataaagtttttaagtcgtttcacccctaacgacacctccttagttaaagttaatttaaaaacatattaaatatgtacccatcagtttttttcttaaacataataaattaataactttaaatttatttttaatatataagatgaagtaccatttagtgatatattccctagtttttgtaaataaaacctcattattaattaattttcgtcaatatgttttgaagaacgatattctaaaatatctgggtcacgatgtttaattaaaaccttattactatttctcggtttctcctcactcaaagattttaaaagcgaccatatcatcgctataatgaccacggaaaatggtaacgcagcaatgattaataaattttgtatcgcttgcgtaccacctgtgtagatcatgataattgcaaataatgccataatgataccccaactcactttgacaaatgacttcggattaatatcacctcttgaactcaacatacctaaaacataagttgccgaatccgctgatgtaacaaagaaaatcataataacaagtaaagtaattaagcttaatacaaaacctagtgggtaatgttgtagcgttgcaaaagttgctgtttctgtcgctgctttagcaatatcggcaatatgattatcttgtaagtaaattgctgacgcgccgaataccgcaaagaatataaagcaaactaatgccgggacaaaaagtacacctagaataaattctttaatcgtacgtccttttgacacacgtgcaataaatatacctacaaatggtgcccaagatatccaccatgcccagtaaaagattgtccaattttgtaaccattggaatttttgaccgcctgacggaatgcgtaaactcatactaaagaaatttgcaatataattacctagaccattcgtaaatgtatttaaaatgtatagcgttggcccaacaataaaaagaccaataagtactacaaaagcaagtaacatgttgatattactcaacgttttgatacctttatctatacctgaccatgctgaccaagtaaataatatggttgcaatgacaatcaagattacttgcatcgtgaaattactcggtacattaaataaaaaatgtaaaccttcgtttatttgcaatgcaccgaaacctaatgttgcagcaacgcctgttactgtagctatgactgccaatacatcaatggcaccacctaaaggtccacgcattgccttttcacctaataaaggcgtcaatgtagcgctgactaagccaggatatcctttatgaaagctaaaatatgcaaacacaagcgcgacaataccatagactgcccatgcatgaatcccccaatggaaaaatgaaaactgcattgcatcattaattgcagattgcgtgccagctttatgaataggcgttaatttgaaggcatgactgattggttctgccgttgtccagaacacaagtcctattcccataccagcactaaataacatagcaaaccaagacggcaatgagaattcaggatcttcgccttcttcacctaatgtaatgtttgcgtatctcgaaaataaaatatacacacagacaaataaaataactaaaacgagcaataaataataccaagaaaaatgtagcgcaataaatgtagtaatgttttgcgtgagtttttctaactgtttcggaaatattgctccaaaagcaacaaatatcgtacatatcactaaagatacccaaaacactagacttactgatttatttttcataaatacaaaccctttctgtgtaatggtaagttcatacccataactgcaacattttaatcatttataattttatatagacacaattaataatgcctcatcttttaaaaatgatatataaaacacactcaaattatttatcattgagcaacaaagtattttattgtatttaagtaatgcctttctaatgcattattgaattgatacctgcaaagttgccatatttccatttagaatcaatagtcgctagacacaaaaaataagtcgccctatacagtattttctgcataaggcgactttacttactaaactatatattaattactaattttccaatcattgattgtttttccaacaattgatgtgcttgatataagttttcaggtgataaaccttcaaaaacttgtgtcgttgttggttggtaatgccctgattctatatttttcgtaatatcttctaaatactcatgttgtttaatcatatcaggcgttcgatgaattggacgcgcaaacataaattcatgtgtaaatgttatactttttaattttagtgcatttaaatcttgatcttcattaaaagctacgatagttgtaatatgccctaatggttttatcagttcaatcatagtattgtaatacaagtctgtattataggtgcaaaatatataatctactaatggaatttctttttctttaaattgacgcactaaatcctctttatgattcaatacgatatctgcgcccatcttttcacaccactctgttgtttcttgtcgtgatgctgttgtaatgacagttaaaccataccgtttagcaatttgagtggctatactgcctacaccaccggcaccattaatgattaagacagacttcccttcgttttcagcaggattatgtgaaattttaaatgtatcaaaaaacgtttcatatgccgtaataccagttagcggtagactaaccgcttcattagcacttatgttgtgtggtgcttttgcaactatagcttctgacaccaattgatatgtcgcatttgatccttgtctatttggcgatccagcataaaatacaacgtcacccggactaaataatgtaacgtctggtccgatagcttcaacagtaccaatagcatcaaacccaagtacacgaggtgcttgagtgacttccatttgtcgttgctttgtatctacaggatttacactaatgctatttactttgactaagatatcatcattttctggcgttggctttctttgttcgtatactttaaataaatttccttcttccaatttaaagggcttttcaaatcctatcattttcatatcgtttcacctcatttatgaacttatttcttattatacaaaatagaagccatgtgtgcttatatcgcagcatcatgactcctttttcatttgaatatataaataattacagacgactttcgtattacattttagacttatttctaccatgttactgaacaaatttgctttagataaaaaattattaaattttagtcaattaacaaagttagtttgttaaaacgtatactttattattccgttactttaataacttgtttaccaaagttatcgccagtaaataaatttttaaatgcatgtggcgcattttcaaaaccatcttcaatggttacttgtgactgaattttaccttcttgaacccatgttgcaagctgttcactagcttctttaaaagcattagcgaattcacttaccaagaagcctctcatcattacttgcttcttaataagcgtaccttgaatacgtggtccgatatctgcttcaggatgattatatgacgaaattgcgccacatactggtacacgtgcaaaacgatttaaatgcttaaatacttcatcgccaactgttccaccaacattttcaaaataaacatcaataccatctggtactgcttgtgctaacgcttctgcaaaatcctctttcttataatcaataccagcgtcaaagcccagtgtccctgttaaataatttacttttttgtcgccacccgcaatacctactacacggcaacctttaatcttagcaatttgacctacaactgaacctacagcaccagatgcagctgaaaccacaacagtatcaccggctttaggttgtccaatatcaagcagaccatgatatgctgtttgtcctggcattcctaaaacacttaaatataaatcaagtggtacatctgtcgttggaactttagtaatttgatccgcttggacatgattaatgattcgccaaggcaacatacctacaacgacatctccttttttataatctgcgagtgtcgaatcaattacttttgcaacgacatggctaacaatcggtttaccaatttcaaaaggctgtacatacgaatctgccttagtcatacgtcctctcatatatggatccactgaaatatacagcgtttgtacaagtacgccatcgctctcaagtttaggcgtgtcagtctcttcaattttgaatgtatcctcttgaggcatgccttctggtattttgttaaaaagaatttgtttattttgcatcattaatcacctttctttatttgaaacttttacttatttgttacttaagcgttaagtttgaattgtgtcttcgtgatgtctgtatgcaaatacattcttagttgttatattttgacttaagcactgattcattcatgtaacttcaaccacattatatttgctataatcataaatttaaaatgttacgacttagacattttatggaaactctcaaacaatagataatttttgaaaagctctaatattacaagcttttttgcccccgaaaaactagcagttgctttattttttccataagaagtcgattaactcattagcaacattttcattctcatgaagctgactatgttgtgcaggctcaccttcatatttagattctcgataacttttcggactatttcccagtaaatattttaatgatttcgaagaactattagacactctgccgtctgaatgtgtaccatctttcaaatctccataaatatttagcacttcgatacctttacctttataaatatcttttagcacgcgtaattgctgataaggttgattcattcgacttggtttaccatctttatcaactgtaatttcattgacatcttcattcatatttaaaacaccattaaatgtccctgcaatattcacttgtttgtttaactgtggcagtgacttgtcgttaccatatgtcatcatatattgtgcaaatgttaagttccccattgagtgaccgacaaagttgaatttatcgaaattgtattcagattgtaacttagtcagtacatttttaaaccacgcagcattcttatccaaatagccttgtctgttattttcaagttcaattttcacaataggattcactgcatcttttcttagtttccctttaaatgtcactgcaccatcctttgaaacgtaagcagtgatgatatctttagttacccctcttttttctgcttgcttcaccataaacttttcagaattggcactaccaccaaatccatgtaagaacaatgttggaattggctttttaacaaattgctgttgttgtattttaaatgtttgtgcctgtcgttgactaaacaccaccgtaataatagagcctataataatagcgaccgctaacaatgtcgtaataattacaaaaattttcttcacacttttaactcccattcatgtcttttatataagtataaaggatgtgattaaaaatgtcctttagttgattttgaatacatcattaacttttaagatgactttggaaagttgtccgttaacatttgttaattgattgcttctttagctttcaatggtgtgtcacccattgattaatatataaatatgtatatgcatgtttaatttatctctttttataaataaagacctaccagcactcgactgataggccttttaatatctataattatttaatttcttttgtttcggctaactctttgtaccaataagcacttttcttaggataacgttcttgagtctcaaaatcgacatagaataaaccatatcgtttttcataaccatttgaccaagagaacacatccattaatgaccaaataaagtaacctttaacatttgcaccatctttaatagcatctgcaataacgttcaaatgttgtcttacataatcaatacgtgcatcatcatgaactgttttttcagattcaataaattcatctttatatcctaaaccattttcagtgatataaatcttgtgatagttaggataatctttaacaacacgcatgatttgatcatataaaccttgaggatagatcatccagtcccagtctgtgcgaggtacgtcgacatcaaattcacgttgtccgacacctttaagttggtatttagaaccgcctttatcacctgtcgcattatgcgtgatttcagattctccatcgtaacctctcatccagtcactcatgtagtaattgatacctaagaagtcgtttaaatctttggctgcatctaaaatggcataatcttcatctgtaatatttaatttaccgccattaacagataagatatgttgcacaccttccatcgtttcacgagaatacttacctaaatatgttgcatctaagatgaatttattatggatgatatcttctaattctgctgcacgaacatcttcaggatttgatggatcgaacggatattttgttggcaatgcgtgtacaacaccaatttctccttgatagccgccatccttgaataatttcactgctcttgcatgagcaaccatcatattatgatgagattggaaaactttttcaaaatcatatttaatacctggagggaatttacctactaaatattggccatcaccaattggtccaatttcattgaatgtagtccaatattttacttctgggaattctttaaaacaatattcagcataatctacaaagtagtcaatcgttttacgatttagaaaatcgccatctttgtgtaacacttctggtgtatcaaaatgatgcaatgttacaaatggttcaacatgacgtttatgacactctgcaaataacttatggtaatactcaacacctttagggttaacttcgccatatccatttgggaagatacgtgaccatgcaattgaaatacggataccattaacaccgaatttttcacttaattctaaatccactggatatctgttataaaaatcactcgctggttctgcagtgtaccaatagttttcttccaaatacgtatcccatgctacacgacctttaccatccgtatttgtcgcaccttctgcttgatatgctgctgttgctccaccaaaaataaaatcttcaggtaatgttttagtcatatgaaaaactcctattcttaattttcaaattgttgttgaacgaaatcaagggctgcttggccgtctcgtgtcaatttgatatattcggcaccttgagtcttcgctaatttaatacctaatctatctgtatcttgcttaatatcttcatagttagacgcaacttgtggcgctaaaatgattaattggtactctttcataatgtccatatgtgcgccatatccgccagctgccgctttcactggcacatgatattcttcagctgctttattaagtgcattggctaataatccacttgtaccaccaccggcacaaagtactaagacatttgtttgttctgtgatatttgaagctttagctgcatcgtctgatacaccacttgccgctaaaattgaatcagcttttttcgtatcaaagtttgctgcaactttttcttttaaatctgaattactttctttacgtccttcttcttcatcaagaatttcactatcataaacttttaggaatgggtagtaaataataatatctacaacaatcaaagtaatagctagaacgaatgaccataaaccaaaacctgtacccatgataatgcccaatggacctggtgttgtccaaggtaaattcacactaaaactattcattcctaacacttcaacgaaaagtttgaaaatccatacgttaacaattggtgctaatacaaatggaataaagaacacaggattcaatactagtggtgcaccaaataaaattggttcgtttacaccaaagaatgttggtacaactgatgcacgtccaatcgctttgtttcgtttagatttcgtcatccacataaacatgaacgggacgaccaatgttgcacccgtacctccaaaagtaacgataaacatttgtgtacctgatgtaataattttatctgcgtgttctccagcttgaagcaacttgaagttcgcttcgatattcgcatatgtaatggctgcaattgctggctctactattgatggaccatgaattcctacaaaccagaataatgcaaaggcaccaaagataattgtgacaccaatccatccatctgctgctgtaaataatggttcgaataattttaaaataccttccgctacatttgatttaaagctgttgcgaatgactaaatctaatgcataaagaatgatgattaccgctgaaaatggaattaagtccttaaatacttgtgaaatattcggcggtacttctttcggcattttaattgtaatattgcgcttcacacagaagttataaacaataacagttacaaatgctgataaaaatgctgttaataaacctttagttcccataaatgcacttaagaatccaccatctttggctggatcagaagctaagaacaagaatccacacatcgctgctagcattgtagaaataaagttaatttgatttgtactttctagcttacggttaaatgaatctgttaaagatttcgctgtcgttcctgctactaaaaatgctacaagccccatcgtatagttatatggtttcattaaaatggcttccatgcctttatcccatttaaaaccaaatatatttggcacgtatgcaattaatagaaagatacttgagaataagatgacaggcattgcagaaataaatccatcacggatggctcttaaatatatgttacgtgataatttctcgaaaaatggcttccctttttcaatttgtgcgatcaatttttgcatcattgtcatcaccctcttttataaaattctaataaatgcttcattaaatctttcagtaaaattgttgtcattaaatgatcttgaccatgcatcatcgttacactgtatgcaatatcatcaccttgcgcttctttagccaacaggcttgtttgtgctctatgcgcttccgcaatgcaattgtttccttcttcaatcagtgcatctgcttttgcaaaatctccagcttgagctgctgttaatgcttctaaaaacttagaacgtgcatcccctgcaaatgcaacaatttcaaaacctaataattggacttcttctctattcatagcattaatccccttttaaacttattttctttgtttccaagatgtcgcagtatcttttaatactttatttaagtcatcaatatttttgaaaccagttgtacgtaaccattcacgagcagcatcttcaccttgttcaatgtatacttgaacagcaccagaccatgtagcacggccacaaagtaccccgttgaatttagcaccagcttcgtgagcaaattttaaagtttcttggaataattccgcagaaacaccagcacttaagtaaatgtatggtaaatgagttgctgcatcttgatctttaaagtgttgtgccgcttcctcttttgtataaaccacttcaccttcagcaaagccttctacatatttcatgtttactggtacttcaactttcaatacatcaacgttaaagcgtggttctgagaataatttcattgcttcgttaacctttctaggcttaacttttgcgaattcaacactaccgttatcaggaatgttgtcatcgtatgttaatacttctaaaaagaatggaatatcttctgcaacacattctgaaccgattctttcaatgtatgctttcttttgaatgttaatttcttcagcatcatcaacatcatagtaaagtaagaatttaacagcatttgcgccttgttcttttaaacgttttgcagaccactctactaaacagtcaggtaaacgacctttagcgtttacgtcatatccagttttttcataagcaagtaataatccacaatctttgttacgtgcatctgaagctggtaaaccatattctggatctaataaaattgaagacgcatattgtgttaattcttccgcaaccaatacttttaattgttcaatttgagcgacagttggctcttccgtttgatgtttagccatcattcgttttaaagcaccacgttggtcaaatgctaatgcagaaatgataccttcgttattacttaattgttcaattgatgcgattttttgattagattttgacattatttacacctctaaaacttcaatttgattgaataattcatcataattatttaaattgacatatcctgtttgtgcttcttgcgcattcagcatgcctaaagtattagctttttttagtaaatcgtggtcgttttcatgattgagaattgctgaagtaattccagcaactgtagaatcacctgaaccaaccggatttaatacgcttattgtcggaatattcactctatagaatgtatgattgtgcttagcgaatgcaccttgtgcacctaaagacacaataatccactcaattccttcgaataagggttgtgacactgcctgtttcaaactttctaaactttcatcaagtggctggttaagcaattgatatagttcagaaatgtttggtttaatgactgttggtttgtatggattttccaaaactgtttgcaaagttgcacccgagcagtccaatatcacaggcacacctttgttttggcatcgttcaataatttgtgcataataatcttgatttaatcctttaggtaagctacctgaaatagcaactgcttcaactttttctaataattgttcaaaatgtttaataaatcctgcagcctcttgattatcaatctccggtccctgctctaaaatttctgtttgttgcccttcatgtaaaattgcaatgcagtttcgtgtttcacccttaatgttataaaatgcatgcttgatgtcggcatgatctaattttttagcaataaattgacctaattcaccgccaataaaaccactcgcaaggactggctcgcctacttgcgcaagtactcttgttacatttaaacctttaccaccagctgttttacttacttcttgaacacgattaacatcatctaatttcaatgctgttaatggatatgaaatatcaacggatggatttaatgttaaagttaaaatcatatgtgtcgtcccttaatcgtggtattcgcctctgtcccatttttctaagaattcatcaaagaaatgtggatcagcttgatctgcattgcttgtttctaaatgtttaattttagcgattaattttttgttctcttcagttggtttatattcagcattaataaatgcatcgataatatcgcacattaataactcaccaataatacgtccaccaaagccaataacgttcgcatttaattcttctttagcatataacgctgatgtcatatcacgtactagtgcagaacgaacgccaggtactttatttacagcattgttaataccaacacctgttccacaaatacaaacacctaagtctgcattaccgctaacaacttgttcgccaacttttttaccaaaaattggataatgtgttcttgtgaaatcgtatgttcctacgtcaatgacttcatgtccttttgattttaaaaattcagatacacgcatttttgtatctgtaacaatatggtcgcatcctaatgcaatcttcatagtaatttttcctccttagcacattttattaagcatatctacgcggatttggtgtctaccaccatcgtatttaccttcaacaaaacctttaacgacatttttcgctaatgtgtctccaacaatttcagatcccatagtgatcattcttgaattgttatggcctctagtcatatatccagagcgttcatctgataattcagcagcaatcatgcctttgatttttgtagcaaccataaagctacctgcaccaaatgcatcgataacaatacctaagttaccttcttgactttgaacatcttttgctacagccaaagttgcatcaacaaagtcaacttcctgcccttctgttacgtcaacaacgtcatatttattgtctaataagtatgatttgatgacttcttttaatcgtttgccagcttcatctgaaccaataataatcgccataataagactcctttttactttaattttgaaatacctttcttaaaatatgacatgtttatttgtaggttatgaaaatcttgagaaaaggctttcaatttgattacgtttaaattataaacataaacaaacaataaatcaacataatatgtttataatctgtttgtttatgacgtattttcaaacaataagtgaacattcatattgtggtgttgttttaattaggtattcgtctgaaattgtagtaaaactttgtcgaggttcccgttgacataaatttgcaaaaaaataacccataaatgaatggaaattcacattcacttatgagcatatagacacatattttaacaatgcagttatatttttaatttagtcgactacttcaatatatgttttaatcgtttctaccttttcttcatcttcataatccatgaccactgcagtcaattcgtttaactgacaaaatgatgtaaaatcttctttgccaactttcgtatgatcgattaacaagtatttttcaattgaattacttagtgccaattgttgcgtataggcttcatctaatgtagatgtcatcacagcacctttatttactgcgttactactaaagaacatcttgctaaatcttagtttttccaacatggcattcgccatttcacctacaaacgcttctgtaatatggcgcatttcaccaccaattaaatagacacgaaaatgtgctgtttgtttttccaacaaaattttatacactggcaaacaattcgtaataattgtgagcgtatgatgattgacttcttccgctaatagttccactgttgttcccgatccgaaaaacaaagtatccccatcttcaattaatgatgcagcttttttagctataaatcgtttttctgcaatttgacgggtatgtttttctttatgcgatatttctttatactgaaatgttgaattactgcgtgcaccaccatgaatcttcgttaaaatccctttattttccaactcaattaaatctcttcgaactgtcatatcagacacatttaaaccttcgacgatttcattcgttcttatcgtgccctttttattcactagtttagcaatttcgtccaaacgttcatgtttattcaatgtaaaattgcctcctttatttaggcgatgggtcattatcctttatgtttagacatcaattttaatatacatgcttattctataataaaaattgcgtaaaaactaatataatttaactgttcgattatatgtataattcatttttaaaaagaactgtttaaactgcgcttttgataatcgtaaaatgaatatactataataaaagcaaaagacgttataaatcattcattattttgatggggtgtttattttgagaaatgatttagagacattaaaacatattatagatagttcgaatcgtattacatttttcacaggtgctggtgtatctgtcgcaagtggcgttccagatttccgttcaatgggtggcttatttgatgaaatttcaaaagatggactttcgccagaatacttgttaagccgtgattatttagaagatgatcctgaaggttttatcaatttctgccataagcgtttactatttgtcgatacgaagcctaatatcgttcatgattggattgcaaaattagaacgtaatcaacaatctttaggtgtcatcacgcaaaatatcgatggtttgcactcagacgctggaagtcaacatgttgatgaattacatggcacgttaaatcgtttttattgtaatgcatgtcataaatcttatacgaagtcagatgttattgatagaactttgaaacattgtgataattgtggtggtgccattcgaccggacatcgtattatacggtgaaatgttagatcaacctaccatcataagggcattaaataaaattgaacatgctgacacccttgttgtactaggttcatcactcgttgtacaacctgccgcaggattaatatcaaattttaaaggcgacaatttaattattatcaataaagatcgaacaccttatgatagcgacgctactttggtcatacatgacgacatggtttccgttgtaaaatcattaatgacagagtaatcagtacgtaaaaagcatttcccgattaacagggaaatgctttttattttggagttgcgtttttggaattcgaagtttggtttttggaattcgacatttggaattccaaattaaaatgagtggaaaattttaattattgcgtgtttaatgacttggttttgtagcgatttttatttgaataggatgttactttataacattttcaatcgctaaaggcccattcgtaaaaaattaactgtaaatcttatgcttacaactcattttattgtttatttttattgcgatttttcttactaaagatatttgtttcatcaatagattttttattactaaaatagactgtaaaaataatcgccattcctgcaaatattggtactttatgatatccaaatggtacaaagtacattgccgtgagcattacgatgcctataattaaagtaataatggcaaaatgtttatatttcatgttattatcccctatacaatttattctacattcattatatacttcattttataaaattatcaatactataattattatcttaggtaagttattgcataatataaaaatatataataacttatttgcttgctcctttcactttttaagagtaaaaaataacctgaaacaaagacttaaacatccaagtttcaggttagtgtaatgtaaattatttactttgttatattatgattaaacatctaattctctgcttgtaagtgctttaatcatctctggatcagcatgtgagaaaaattggctattactttcttctaatgtcgcaatttgttgtttatcttcttctgtaagttcaaaatcaaatatatctaagttttgagccatacgttctggattcactgattttgcgagtacaacgatgtcacgttctactaaccagcgtaaaataacttgtgcaattgatttgttatatttatctgcaatggcctgcaacaattgattttggaataattgatttttaccttctgcaaatggtgcccaagcttctaccacaacattttcttgttgaagtgctgcaacttgttcttcttgttgatggaatggattaatttctatttggttcacttgtggttgaatttgattgtgaatacctaaatctacaattcgatcaacgccgaagttagatacaccgattgctttaattttaccattttcttttaactcttctaatgcacgccatgagccatatacatcattataaggttggtgaataagcactagatcaagatagtccaaatttaatcgttgtaatgatcgttcgattgatttgatagtatcttcatagttaacattttcaatccatactttagtcgtaatgaatagttcacttctatcaatacctgaagcttcaataccttgacctacttcagtttcatttaaataactttgtgctgtatcaatatgtctataacccgctttaattgcttctttaaccgcttctgctgtttgttcttgaggaatttgaaatactccgaaacctaatactggtatctttacatctttagttatttcaatatgattcataaaatgaacctcctttatcttgtaagtccactataaaccatggagcaaactctatagcaagccataggtttactttctctcccaaagacgttcaacattggcatcatgattatcactagcattgattttagcaatatgattatcataattatcaattttatattgtagtaaatctctcgcatcatgaattgtctttaagttttcatttaattcttcgagttgcttatttaaaatttgcttttgctgtgcttgaatattttcatttttaggaagctgcgctaacctacaaaattcgataagcgattcaatactgacgcctgcatttcgcaaatttttcactaaataaatccaatttaaatcactatcattatatattctatatccattttcatctcgattaacaggtggaatcacaccaaccttttcataatatcttaaagtgtcttgagatatattcatgagcgctacgacttctttagttttcattgcgactatcctttcagttatgtttggtcgtctaaagtaatgttgctttatatattgccacctttgtttgaatacttcttattttattactcaaatttaaatttgtctcttttttaacattttacttttcatcgtttttaattactttaaaaattgtataacttaaatatttaaaatgatataattactaagattgataatatttaattttttaaaaattattttcgttgcaatttttgggtgatgcggaaaatttgggtgatcgattgtttatatgcatcaacattctttgtggattgtttgacagtagacagtcatttgtatacgttaacgaattttgaaaaattgaatcattatttaatcataatattcattgcgcacgcgcaacacaaaaaggagacatgtcaatgacatatagaataaagaaatggcaaaatttatccaccattacgttattaatggctggtgtgattactttgaatggtggtgaattcagaagtattgataaatatcaaatcgctgtggctgatacgaatgttcaaacgccaaattatgaaaagttgaggaacacatggctggacgttaactatggttatgataagtatgatgagaagaatgacgcaatgaagaagaagtttgaggctacggagaatgaggcaaagaaattacttagtgagatgaaaactgaaagtgataggaaatacttgtgggaaaactcaaaagatttagatacaaagtctgcggatatgactcgtacctatcgtaatattgagaaaatcgcagaagcgatgaggcataaagatactaaattaaaaacagatgaaaacaagaagaaagtgaaagatgcacttgagtggctgcataaaaatgcatatggaaaagaaccagataaaaaagttgctgatctaaaaactaatttctcaaaatcagcacctcaaaagaataccaacttaaattggtgggattatgaaattggaacacctaaatcattaacaaatacgcttatattgctgaatgatcaattttcaaatgaagagaagaaaaaattcactgcccctattaaaactttcgccccagatagtgacaaaatattatcttctgtaggaaaagctgaacctgctaaaggcggaaatttagtagacatttctaaggtgaaacttttagaaagtattatcgaagaagataaagatatgacgaaaaattcaatagattcatttaataaagtcttcacttacgttcaaagtaatgcaactggtaaagaacgtaatggattctataaagacggttcttatattgatcatcaagacgtcccatacactggtgcttatggcgttgtactcttagaggggatttctcaaatgatgccgatgataaaagaaacaccttttaaagatagtaatcaaaatgatacaacattaaagtcgtggattgatgaaggatttatgccactcatttataaaggtgaaatgatggatttatcacgtggtagagccattagccgtgaaaatgaaacgagtcactcagcatctgcaactgtaatgaaatcattgttgagattaagtgatgccatggatgagtcaacaaaagctaaatataaaaagattgtcaaatcttcagtagagtcagattcaagttataaacaaaatgattatttaaattcatattcagacatagataaaatgaagtctttaatggatgatagcactatttctactaacggtttaacacagcaacttaaaatatataatgacatggatcgtgtcacctatcataacaaagacttagactttgcatttggtttgagtatgacgtcgaaaaacgtcgcacgttacgaaagtatcaataatgaaaatctaaaaggttggcatactggtgcaggaatgtcttatttatacaatagcgatgtcaaacactatcgtgataacttctggacgacagccgatatgaaacgattagcaggtactacaactttagaaaatgaagtattaaaagatacggatgataaaaagtctagtaaaacttttgtaggcggaacaaaattcgatgaccaacatgctagtatcggaatggattttgaaaatcaggacaaaactttaactgccaaaaaatcatatttcatattaaacgataaaattgtcttcttaggaactggcattaaaagtactgattcatcaaagaatccagtgacaacgattgaaaatcgcaaagcgaatgggtatacgttatatacagacgataaacaaacaaccgcttccgataatcagggaaccaattccgtctttttagagtcaaccaataaacctaaaaacaatataggctatcattttttaaacaaatctaaaatctccataaaaaaagaaactcatactggaaattggaaagaaataaataaaagccaaaaggatacacgaaaaactgatgagtattatgaagtaactcaaaagcattctaattctgacaataaatatggatatgtgttgtatccaggcttatctaaagatgactttaagacaaaaaaagatgaagtaactgtcgttaagcaagaagatgacttccacgttgtgaaagataatgaatcggtttgggctggggttaattatagtgatagcactcaaacttttatcattaacaacactaaagtcgaagttaaagcaaaaggtatgtttatacttaaaaagaaagatgataaaacttacgaatgtagcttctataatcccgaatctacaaattccgcttcagatattgaatctaaaatttcaatgaccggttactctattacaaacaaaaatacatcaacttataatgaatccggcgtacactttgaattaactaaataagcaagaaaatctcgacactataccatttttatagtgtcgagattttataagtatcgccatcattcatcttgtaatccgcagaccacatcccctttgataagttctagattatttaaaaatcgaattttcaaagacgtacatgcttcaatattcttatcattcattacttgaaaatgtatatgaggttcagtagaattgccagaattcccaaccttcccaaggaagtcaccatatttaacattttgcccctcattcacaatgattgaatattgttgtaaatgagctattaagctatactcattttctgcgtgcttaattacaatataatttcctaaaaactgtgattcattcgtacttccaatactgttgtcttgaaccccattcactactttttcaactgtaccatttgctggcgcaatgatatcttttccaaaacaaaaataatcagtatttacttttccttgattcttatatgttttatgattttctttaataactaaatcaatagcatacctttgatgtgggtataaatagtgataattatataattcattatctccaccccaaaaaacctcatagcaatctgttgtcggcactgcgtattttaaagtcgtttcattcttaatagcatcataattgattaacggacgcataacaaatccgataatactattatctttccaagtcactgccactccaaattgatttgctttatctatccatatttgctccatagtatcatcattttgagtacacacttttaactcatgtacatcagactgccttgtataagatttgaaaagtttcctaaactgccaataactaaactctcgcttcaaattttgatcaaaaatcttatatattttcctgctcttacttttatttaaataatccccaaagtttgttttattcatatatacttaacctcttatgtttattttggtatcaattctatactaataatatgttcataattttgattaggacattttacatataaaataggagtttctctcacttataattcattatccaattatattttaatatatacttgatgcaattcaatattattctcatgatttttactgtaatgatttattatttataagatttaaaaaaatccctccctgacaaatagtgggggatttcatgcattactattaaataaacatcgattgaagtaagccttttttctgttgttgaagtatttctattttttgtttttctaattcaatttgtcggtcaaatctatctaagaattttgctattttttgctgttctaatttattgggcaaaactaaaggtaattttgcatattcttcactattaatacccggttgaccagatcttacagacatgaccttcacccatttgttaaattttgatgttagtgtaaattggtaaatgaacaaaggactattttgttcgtttattttaaattttattaaaaatccagcgaaatagtaattataaatatccttttcttctttgtgaatataacttttgcccgtactagcaccagttcgtgcaaaaagaatatcatttcttttcagcttgtacttattattaagttcatcaggtgtagttaagttttgataatttaatttccttgatttttcatcaatatcagtaattcttatatatatatttttcgaatcaaaccttgttgcagatgcacctataccatacatagattgttctgtaatatcccctaacttcttctctttccaatctggataatcttcaccattctcatctttgaatcgcaattcttgcgagaagattttctgcatatagccttttttctgttgttgaagtaattcaagtttttgttcttctaattcaatttgtcggtcaagtttgctgaagaatttacctattttttgctgttctctaagcagcggataagaagaactaatactataaaaatcactatggtttaaatctggtatcgtcgaagatcctgctaaagataatattttattttgtatcttagatgaatttaaaacctctactaaaaacaatctatcatacagatttttatcaaatttaattttaaaaaaattattatgaaacgctccaaatacattagttactacttttccagtattacctgttctagtcattaaaatatcttctttatttgcaattactgattgagggggattttcgataaaatatttagtttgactatttggtcttaaaaattcgtttgttatataaaaatacaactctggagaatattcagttttacgttcattaatagcaatctgtaatccttgatttattttagtaaaatcagcaaactgcttctcttcccattcgccttcaaattctgggaatctcaactctggcacatttttcttttgtgtattactcatctttcaacacccctagttctttcaggtatgcattgatttcttgttcaatttctgcgatttctttgtcgatatttttcaaatcttgttggacttgatctaaatcaattggcgcttcttcttcgaatgtatcgacatatctcggtatgtttagattataatcgttctcggcaatctcttgtaatgtcgcgctgtagctatatttatcaatcgtttctttacgcttatatgtgtctataatacgttcgacttgggcatcgcttaaatggttttgattttttcctttttcaaaatcattggatgcatcgataaataatacgttgtcgtcttgttggcgacattttttaaatactaaaatacatgttggaatacttgtaccatagaaaatattcgctggtaagccaatcacggcttctaagtagttcttttcttcaattaaataacgacgaatgacgccttctgcggcaccacggaataagacaccatgtgggagtacaactgccatggtaccttcatcgtctaggtaatgtaccatatgttgaataaaggcaaagtctgctttggattttggcgcaagcttgccgtaaccactaaatcgttcatcattttcaaattttgaatctgctgtccatttcgcactatacggtgggttcgcaataaccgcatcaaatgtatggcctaaaaaggctggattttccaacgtgtcatcattacggatatcgaaattttcatatcgtacatcatgtaataacatgttcatgcgtgctaagttgtatgtagtattgttacgttcttgtccgaaataacgatacacttgcgtttctttaccaacacgtaacaacagtgaacctgaaccacatgttgggtcatacacgtgacgtaatttatctttaccgtctgtgacaatcttcgccagtatcttagatacttgttgtggtgtatagaactcgcctgcttttttacccgctgtcgccgcaaagcgcccgataaggaattcatatgcatctcctaacatatcaatttccatatcactgtgaacgaatggtaagtcgtcaaggttaaccatgactttagagattaacgcagtacgttctttgacattgttacctagtcgtgttgaactcaaatccatatcgctgaacagcccgataaagtcattttcactttcttcacctaatgtagatgtttcaactttgcgaatcgccgtcgctagatgttctatatcgaaatcttgcgtttcaatttcacgaatcatcgcactgaataaatcttgtggctcaatgaagtaaccgacttgatcaattaattctgcttttaaatcttcacggtattcttcgtctgcccatgcttcttgatacgtgatgtcttcacctgacaaggcatctgcatattcttgttccgctttttcagataagaagcgatagaaaatcaagcctaaaatgtaattacggaattcactcgcatccatgttccctcttaaatcattcgcaatcgaccataattttttatgtaattcagcttgttgctgacgttgtttttcagtaatagacatgtgattcctccgcctttgaataagtaatttatctctttgtgtaatagatttattataacatttggttatgttgcgatgtggagaattttgatgttggtggtggaattaagattgatggactattcttttgtcatgatataaaaatacatttctaagaaatgtatttaagaaaaaattaaaaaacagttaattttatttaataaaaagtaaaagtatagtaattatatactagaaaggagttttattatgactaaagatatattaaaaaagttatttataacattatctcttgcaatatttctctccccgttgattagtcatgcagaaaataaattattcgcaaatacatatgaagaatctgaaattttaaaaaagagagaaaagtacaatgcagccccttccacattaagtgaggaagttttttcaaaagtttcaaatactatgaaaagcccctataattcagttggaacagtttttattaagggggagactatagcttctggtgtattaattggcaaaaatacaattataacaaactatcatgtatcaaggatggctaaaaaagatccgactaaagttatattcacacctggttcgactaaaacagaagatggagtatataaaactccatatggacaatttgtagcagaagaaattaatgaacacccatatggacaaggaactgatttgtctataattaaactaaaacccaataaagacggaaagtctgcaggtgatttaattccccctgcaaagattgcagattctatagatttgcaacaaggtgacaaaataagcttgctcggatacccttataacttttctactaattctttatatagaagtgaaattgaaatctttaatttaaattctggtcaatattttgggtatactgagtcgggaaattctggatccgggttgtttaatttaaaaggagagttagttggtattcatgttggaaaaggaggaaaatataatttaccgataggtaaattttttaatactgaaattggctcattgtattcagtagataattcattaagcactttaggtagtgatttaaagaaaagagctgaattacagtctcattagtaatgattctagaccttatttcattctaatcattatggaataactttctacattaatttacatcaacactatttatatgacaggtaaaagcgatcataatttaaaatgaaattttatagccaaaaatattaaaaaatgatagagaggtgtaaattgtgaataaattctcaattgttttaattttattaatgctattagttgctaactatcaaatagttagtgcatctagcatatctgataacagatcgctcattactgatatatttaaaactaagaacagcttgaatactgcaaaatatgaaggaaaagatagtcatcattgtactgctgttatgattacaaaagatattggtttgacagcatctcactgtaaagatggtggatttgaagaaggatatatagggactatttatcctggcgaatctggcttagctacaaatgctggaagtgcttatatttcaacatttaatccatttactggactagatatagctattctcaaaacaaataatcaaagtaacgattattcttattatctaagaaatataaacttatctgtcaaaagcgtgaactttcataatcttataggaaaaaaggtatattcaatcggatatccgattgataaaagtggatataagcaatataaaacagaaggtactattactcaaacagtacatgacaacgcaattcgaactacattacaaagtacttctggacaatctggttctggtgtgtttttaaaagaaaacgatcaattaatcggtgttatttcagaaggaagtttggatggtagtttagtcataccaattaatagtcaaattgcagattggattgacagagtaagacactattaaatagcttaaaataaaccaaaaatatcataggagatgaatttaaatatgaaagatacaattgtaaaatttctatcagcattccttgtgatttcaagtattagtttgatagatacatcttttagctctaaatataataaaatctcaatagctgccgagactaaaaattttacagacttagttgaagctactaaatggggaaactcattaataaagtcagccaagtattcttctaaagataagatggctatttataattatacaaaaaatagttcacccataaatactcctctaagatcagcaaatggtgacgtgaacaaattatccgaaaacattcaagagcaggttagacaattagactcaacgatatctaaatctgtaacaccagattcagtctatgtatatagattattaaatttagactacttatcaagtataactggctttacgcgagaagatttacatatgctacaacaaactaacaatggtcaatataatgaagcgcttgtgtcaaaactaaataatcttatgaatagtagaatttacagagaaaatggctactctagtacacaactagttagtggtgcagcactagcaggtaggccaattgaattaaaattagaattacctaaaggtactaaagcagcatatattgattctaaagagttaacagcatacccaggtcaacaagaagttcttttgcctagagggacagaatatgctgtaggcagtgttaaactttctgataacaaaagaaagataattataactgctgtagtttttaaaaaataagaaaacataaataatatatatcctaacaaatatactttaaaatattatatttgttaggatttttctcttgttaaatgtcatctacacaagtacttacaccgaattcttttaataagtgtattaaattttctttttgtgcttatcataaaaaattactactctttcagttaaataacatctacttttatagatattcaaataatttatggttatagtttgtctgaattaatgccacattattatttaataaaaatccaaaaaactcattcactctgtttacatattgcttttttctcgaatcactttttaaaacatagtgcatattaagttcagactttatgatattgttcctatctttttttatattattttcattgtaatgttttttgaaaaatgcatcgtcaataatattatttttattaatataaaaaataaagtaccttaataaccaatatttttcttgcattctaacgcttgcatcatcgttgtaagaagaatgcacttcttttaatttatcttccaatgtatttaacaacactttaaagctaaatttctttttaatccacaaaatgacactcaaacattttgagtaatcatctaaatcattttttaatattaattgtaaagattttttatttagtattttttcttcatcgaataaaacagagtataataatatttggtatacttcttgattccaaccatttaaaatataataatctaaatttcctttccatatttccttgttttctttaaaatattgccttgctattttctttagtttttctttactaatttttaagtctatcaattgctctgtaaagtttataaatttatttgttaacctcgaatctttcaatgaaatatccaaaaatttctcatataggttatattttgttaatttttccctactaacaagaatattgtttatcttatttgaggacatttttgaatctctaagtttatttattaccaccgaataaatgcattttactgctcctttattacctgaaacttcttcacttaagcagaaatcaataaaatcattaatttttgatttccaatccgcaatttccgagcttttattcaagctatctagataactaaaaatctctactttttgcatgttattacgatatggaaaagtctgcacatctgtttttttatcatttagaattaaattgtactctcgacatatggaattaaattccatcaaaaatccttctttatctgtatttgatacaaatggatatttaatatcatctacatatctagcatatttatatcctttttcaattaattttttgtctatatagcacatatatagttctgctattatccttgatataatattccccacgggtataccatgagtttctccatattgacatttttgaattaaactatccaaattattagcaaaccctttatatctattatctttcgagttctgttttccgtgtatgacccaaggtatactatgtgtgtacaaagtatgataaaagtttgataaatctaaagacaaaatactattccctccaaaaagaagcctctgctctattttcttagtgaatttaaaattaaagtttaattcattaaaatattttgaagttgattgtacattgttttcgaaaatattgataaattcctctttattatcttctataaaaaaacatagatgtaagtaactatagacatttggcatcttatattctctacgaacataattatttttaggagtattaaaataaattggttccgtatctacattctttttaaaatcagagaaattaaaaaatcctcttaaatcctctgatttcatcagaaaatataagtcttgcaaaccaaaaatttttaaatagaaagtatctggtttgccataataatcttctaattcttcattattaatattttttgattcaatctttttcattctaacatcatagtatccatacctaattagaaaagaactatctaaaatcgtgttatataaattacgaatttttaaattcaccatattttctaatcatcccttaaatattaatatttgcacttaaaaagtatacatatcactcaaacaatcaataatcatacttaccttcaacaaattctttaacatgcagtgttatcccttgataatatggatattttgttaatctaaatttctgctttaatgcttcatctctactattcgacatcaaatatgcatgttcaagatagcttaaatatgcttcatcattgccgctatctccaaaacctaatattgactttactggtatattgtattttttcatcagaaattgagtagcatataattttccagcatttgacggtgtgaagtcaatatcatacgcattttcaggatcaccagctaatgggttgcttcgactaaatctcgctgtatagttttggtcatttgcgtatctaacaagtgcttctaggatacgcctatcattgctgtgattacctgttgaatgaaaataaaaattataatgtgtttcattaccttcaaatgctctttgtggaataaattcgacattatattgcgcagaaatatgacgtaatatatcttcaatatcttcaaataaaaatggttcgctcaagactttctttttatatgtttctgattcaatatattcgccattattccaagtgaacattttagaactcaaatcagaaaagatatgtaatggtttaaacgtcatattaacttgatccattttatccatgacactttgaaatgtacttcctgtcaacacagcagtcatcacttcattattattagttagtttttccaacaatttttccatttctcttaaatgacttaaatcttcttcatttgtattatgtttaaaatatgtttcatcaaaatcaaacaataataggcgctttgacatactcattcctccataatattttaatgaatttatctataacttaaatacactataagtctcaattaaaagtataagatcgactatatgcttttcatgattattatatacaactaatgaatcgctataaactaaaaacattgcttaccacttttcaaaatgcacgagtcatatccctcgttaaaactattactaaaattcaaaaatataaaaaaatcaaaaagtatgttttaaactttatgaaacgtgttatataaatagtgtaatataccacaacattaaaaggagattgagatatgaaactaaaatcatttgttactgccactttagcattgggattattatcaacagtaggtgcagctttaccgagtcatgaagcatctgcagatagtaataacggttataaggaattgacaatggatggaaaacacactgtaccttacacgatctcagtagatggtattactgcattacatcgaacttactttgtttttccagaaaataaaaaggtactttatcaagaaattgacagtaaagtaaaaaatgaattagcttctcaacgtggtgttacaacagaaaaaattaataatgcacaaacagcaacttatacacttactttgaatgatggtaataaaaaagtagtgaatctaaagaaaaatgacgacgttaaaaattcaattgatccaagtacaatcaaacaaatacaaattgtagttaaataataatttgaaaatgaagaataattacatgaggcaaacgctgaaaaattgcgtttgtctttttagttattgaacgaatgattgaacttgtaatttatttttgtttgcttctcgtagtaacagattggcctatactaaagtaaattcgatattaatgtcttccgtaatttataatctaaacataacagtaaatctcaaatagctagaacacaaataaatcccctcactaccgctaatagtgaagggatttattttattacttagacgtaattataaatatatttgttctattgtagtcttgcttaatcatataaaaaaactaccatttccaaataacgcattttgaagtcaattttcataaaccgtcattacatttccgcattcattattcagcttctctaatttcatctgaaatatctttatagtcaatatttgcatttatgaaatcttcatcttgaattggaaaatgctgttcaaatgtttctatattttggatttctaccttaacatcttctacttcaaaatctaagacatgtccaccaaaattacgatcatcatttgcaaagtgtacatggaatcctgctgatccgataccatggaatagttctggtgtaaagaacccaacgactgaacctttgacgtatgtttcagtttgttcaggttgtcttctagctgaatcaattaaacgtgtataaggtggctcttgtgccggcatcatacgtacatgcatttttttaaataatcctgaaatttttactgctgaaaataaattttcactcagcattttctccttaatttctgcaaaaactgcttcagaagatttatctttcgtttcatagcttgtatctgctacgaatttagttacagttgcatatggtgttaactcgtcaccttttaattctacaaattctttatgttcatttgcatggtaagcttttccatctaaaaagatgacctcaccatttgaacctgttagtgtagcgatacctaggtcaccatgttgcaataattcatttattgatgcagttccttttaataaacctgccattaatgtgcctaatgtaccatgttgatataaaacactagccataaaatttcccactcctcattaacatttatctttgttttagttaaatacgtcaggtaacatatttgttgaaagtttgatattatctttataatttacaggtatatcaattaatactggtccatctgtttcatagccctctttaattgccgcttctaattcttcttgattagtaactcgtaaaccttttgcgccaaatgattcagcatattttacgaaatctacaggaccgaagtcgacacctgatgaacgtttatatttcatttcttcttggaattcaaccatgttatattttccatcgttccaaataagttgaataatgtttagatttttacgtacggctgtttctaaatcttgtgatgaaaataaaaagcctccatcgccagcaacggatacaacttgcgtattaggacgtacaagcgcagctgaaattgcccacggtaatgctacaccaagcgtttgcataccgttactaaataataaatgtcttggattgtaacttctgaaattacgtgccatccaaatatagtgactaccaacatcaactgttacagtagtatcatcagttaataccttttgcatagattcaataatttcgactggatgtagaattccttcttcatgcgtcgctttgataccagtttcttcatcaatatgtgttcttaattgttctaattcatccaaatgttgttgatttataaatggttcatctactttgtcagaaatcatttcaatcgttttagcaatattaccaatcaactcttttttcggttgcatataattagtaatttcagcttgaacttcgtcaatattgattatttgcgtatctaattctttattccagttactagcctcatattctataggatcataaccgattgtaacaactaaatcacttttacgtaataattcatcaccaacttgattacggaataaacccactcgcccaaagaaatgattttctaatacacgactaatcacacccgcaccttggaatgtttctacaacgggtaaattggtacgctctactagcttgcgaatagcattcgtttcgtctgcacttgaacttctcattccagctaataaaaccggaaatgatgcatttttaatcgcttcaatgacatcattaatatcttgttcacttggtacacctaaatttggtttttgacaaagtgatatcgctttagattcaactggtgaagaaatcacgtcttgcggaatactaataaaacttgcgccattttttcctgaagtagcaatacggattgcatttgtcataacttctgataatgattcaggatcttgtacttcttcactgtattttgatgagtattttaatagcgcagcattatcaatactttgatgcgttaatcgtaataaatcattacgtttcacttggccacctaacgctaatacaggatccccttcagatgttgcagttaatagtccagtcgttaaattacttacaccaggcccacttgtaacaagtactacacccggtttgcctgttaatcttccaataccttgcgccatcattgcggcgttttgttcatgacgagtgacaataagttcaggaccatcatcaattaaagcattaaatagatagtcaatctttgcacccggaataccaaaaacatattctaccccattatttttcaaagtatcaataaccatatcggctgcagtgtactttttatcagtcatttatattcatttcccttcaaatgtgatgtatagatgtgtattacatgtaattacattgtgatttgtaatctaatgatagttacgcaaaattaatgatgtttatcaaaattttaaatgtacgattagatttgtaatacatataaattgccttcatcacattatataacctttgttagatgaataaaaatcgttatttgtaatactaagtattccaaaaatgcatgagtagattttgtgcgttgtgattatgaggaatgttggattgattgatgtataggattgttacgatattttgggatgaggtatttagtcaatggcagtttgaaattgtcgttttatggcgggccgaaaatgttgttttatagcaacatgaaattgtcatttcgataaaaaaagccacagcaagacttagatctaactgtgacttatacatttcatacttatatttatcgattggttttatagttataaatgatagatgcagttcctaaacacattaagaagataatcattaaatacatagaaaagttgtctgttttaatataaaacctaaaaagtagaaacgtcagcatcgcaacaataaaataaacaggaataaaagctttcttccaaaatatagaatctttcaattaagtcactccttattttgataatactcttaaatcatgattcttgagttatcgtctggtcgttcttgcccttgaatatctattattagaacactatcgtacggtctccgcaagctaaatgacaatttaataaagtactcttttgattgtgtaaacttgtacaaattatacgtgtaaatcaataattaatagttgaattaattctatacctgagacattaaataaaagaaagttcatttatactacatacatttcatattccccacacaaacgcaaaaaaacacctcgacataacatcgaagtgttttgtatatatcgttcgacaattaacgttttgagaattgaggtgaacgacgagctgctttaagacctggtttactttagggtttcgtatagttccatatactgtcttaaggcatgatattataggatttctgattttttcgtttacatagaattggatcaaatatcactcagtggtgaaataactgctagccagtagtagaaatccttacaatttataaagtaagatctctatgacaagcataactttattcttaataaggtatttatttttcatatttactaaagaactttaagctagtaaaaactgttaatacagtaattcaactaaatttcctaaaagtaatcatcacttaataaataattgcattcccaattacaaaatttgatatgtaatcattcataactacaatttcacttggactactcatagcaaaaccttgatatacttttaattcattaaaagactgattcattacatctttaatataaattcctagtgctgaagctgctacaccggtagcagaatcttctatgtatcctgtgttgttagggaattgtctggcatgatatatattcttttcatcttttacaaatggataaaatccagtcgatccaattttatcacacactttccataagtaatcgtaattaggtgttaacttatttaatgtcactacatccttcaattcaataattgttttgaatctagaagtagaaatgttctttacaggattacctgtaaattgatttacagatacattcaacgctttagcaatatcaactttatcaattaactgattactaatttcaggattgccctgttttactttgactttgaaatctgtatcgtcccctatgatctcaatctctaaaacaccagccaatgtctctactgaaaatttatttttatcaaggtacttattctttttaagaatagttacacatgctatagtcgcatgaacgcacatttccatttctttatttggaacaaaatatttaaattcatactcacatgagggattgttactattaagaacaaaacctacttctaatttcagttttttggcaatatatatcatatcatcatatgataattcgtcagcttctaacaccaccgggcaaggattaccaccttgatttttatacgcaaaaacagttgtgttataaattttcataattaaactcctcgaatagtttttcatttaataatttattcattctaatccttcttaaatgtaatgctacttataaacctttaactttggcgtttatgatacaaatcattttcatctatccattttagaaaagcaaattttctttcagattttataaaataagacgttgtcttgaataaactttctattagttttcaaaattataatattaatctaccaaatctttgtcattatacaacataatacaaatagctgttgagaatttaggatattgatttacaacatctatagaataaagaattaaattattaagttcttaacttcattattatatttcgctatttgcaaacaatatattgttggaatacctatatctgtagttgtatcaaagaacttagtttcaataatttcagaattaaatgtatcattttattttttatgacacttcatctttatctgaagttcgcgatagaacaagaatgaatagattgttatggttctcctagattatttgttaattttatacttttaataaaactccttcataatgttatgataatacaattagtgttgaatattttataaataaccccctaatgatactatttgtatataattataccttaaattaaaattaatgttatgtattattacaataaatttgtattatagataaaaggagctattatttatgcaatgtaaaagatgcggaaataaagagtttacagaagccacacagtacatgaagattaaaaaggtctaagttatcgataaatggatcggaaattaaatatattttttgtaagaagtgtggtttagttaaagacattgaggttttaaatcccctaaactttgaataatttaatacataaacgtaaaaaaacacctcgacataaaatcgaggtgttttgtatatatcgtccgacaattaacgttttgagaattgaggtgaacgacgagctgctttaagacctggttttttacgttctttcatacgtgggtcacgagtaagtaatccagcgcgttttaaagaacctctgtattcaggatctgcttctaataatgcacgagcgattccgtgacggatagcttgagcttgtccagtgaaaccaccaccatgaacgttaactaaaacatcatagttacctttagtttcagttacatcaaatggttggtttaagtctaaaattaatgattcgaatggtaagtattcgcgtacgtcacggttattaactgtgatgttaccttcacctggtactaaacgtacacgtgctactgagtttttacgacggcctgtgcctctatattcaacttgtgccaaagtcatttcctccttctaattaaccacgtaattcgtagttttctggttgttgtgcagcgtgtggatgttcagcgccaccatatacaaataattttttaccttgtttttcgcctaaacgagtgcttggtaacatacctttaattgagttttcaattaaacgttctgggttagttcttcttaattcaccagcagtgattgatttgataccacctgggtgatttgagtgacggtagtaaactttgtcagtttctttgttaccagtaaattcgatttttgatgcattaataacgattacataatcaccagtatcaacgtgtggtgtgtaagttactttatttttaccgcgtaagatagatgctacttctgatgataaacgacctaatgtttggccttcagcatcgataacataccatttgcgctcaatgtttgattcatttgccataaatgtttgacgcataataattgtcctcctaaaaaataaatgcttctattcaagctataaacagtttcataacctaatagatgatttcatttgtttcatttttaaaacgtttaatttcatttattttgttaactgttgttcgtttctgcttatatatcttgtaacacaataagtttccggggcttatcgtggggtggatataaaacaataccgttaataatcttataatttcacaagctttttgtcaatggcaatcagtcattttgtaatgattttttacgatgtatttttatatcgttgccaaagtcttttaataactcattttcatctaaataaattttctctaaatataatccttcagccggtgcagtgaaaggaacattcttacgattctttgattcaagtagcttcggcacatcagaaatttcatgtcgtccttttccaacttctattaaaaatgcaactaagacacgcaccatgttatataaaaatccagatccagtgacaatataatcaaagccatcatctgtctttacgatttcactttggtataatgttctaactttgctttctacttcagttttttgcgaacaaaatcccgtaaaatcatgtgtacctatgaattgttgcgccgctctgttcattttacctaaatccaacgtttcaggaataaatgttttcaaaccactttgaaatggatcgcggtgttgtgcttgatatactttgtagcgataacgtttacctacacaatcataacgacaatgaaaatcgtcatcgactgtaactacattgttgacataaatatcatcaggtaacgttcggttcattgcatattgccattgtgacataggtatattcagctctgtgtcgaaatgaaagtattgctgtatcgcatgtacacctctatcagtcctacttgaaggatggattctcacatgtcttttatgcatgcgttgtaatagcttttcaaattgttgctgtaccgtacgtccattctgttgaatttgaaagcctagaaaattatttccttgatacgcaatttctactaatatacgcatgaatttacactcctgaatattttaatacgaataaaataattgcaattgggataatcatgattaaagataacgtatctctcaattgccatttaagctgtctgtagctcgttctcttaacattggcatcataacccctaacttccattgcgaccgctaattcttcggcgcgttggaaagctgagatgaatagtggtactagtaatggaataaatgatttaatacgtgttgcaatgttccctgaacttatttcagaaccacgcgacttttgcgccaaaataattttatctaactcatccattaacgtcgggatgaatcgtaacgcaatggacattatcatacttaattgatgaactggtaatttaaacatctttagtggtgcaagtaatctttcaaacgcatctgttaaatcaattggacttgtagatagtgtcataattgttgcaatcatcacaatcccaattaaacgcagtgatatatatagcccttctaaaataccattagtttcaatcgtgatgccatgccattcaactaatacatatccacctttagttaaaaatatatgcatcattaatgtgaagattaaaaagaaaaatattggtgttaaacctttgattaggaaccataattgaatttttgctaatctcataatgaataagataagtgcaaacacccaaagatatgttaatggtgaatgacagaaaaatattaatataataaaaagaaaaacaaacattaactttgctcttggatcaagatgatgaacaaaagaattaattggtaaatatcgccctataatcaatttatttttcatgttgccactccttatacaagcttacaaatgcttcttcagttaaggcaatatcttttaattttgtttgatttttttgttcaaagtcatattgtaactgaacaatttctggcaaaccaatatgccaatccgccaatttttctttatctttgaagagctcttttggtgatgtttgcgacactatactaccttctttcataacgatgacttcatctgcataacgcgcgacttcattcatatcatgtgaaattaggataattgccttattttcatctgtttgtagtgactttagtaatcgcattacttgtcgtttactttgtggatcaagtcctgctgtgggttcatcaaccacgataatatcaggattcattgccaatatcgatacaatcgctattttacgcatttgtccacctgacatttgaaatggtgattgtgacattacatctcttgaaaaacctaaatccatcaacagacgatgggcatagtttttggcttcatctaaattcattttaaagtttttaggtccaaatatcatttcacgctctactgtgtcctcaaataattgagattcggggaattgaaataccattccaattctttttcttacaggtctaatatatttatctttggtcttatgtgtaatagtaatgtcatcaactgtaactgtcccagtagtcggctttaacagtgcattaatattttgtatcaatgttgatttaccactacccgtttgtccaacgatggcgtaatatttaccttgttcaaattctgtattaacatcatgaatagcttgatgctggtatggtgtccctttttgataggtataacttacattgtcaaagcgtatagtcatagttgatccaccagcccttcataagttaagaatgatgtttggtgtcccagcatttgatttattttgattgggaatggcaaatctagacctattgttgttaactcttctgcatggtcgaaaatttcaatcgctgtgccttctttatggacagtccctttattcataacgataacatgatctgcttccatcgcctcagataaatcatgcgtaatagaaatgattgtaatattatgttctgatttaacttttctcactaaatccaataaattttgacgtgcatcaggatctaacatagaagtcgcctcatctaatataatgacagaggggttaagtgctaatacacttgctatagccacacgctgcttctgtccccccgataatgcattaggttcataatctgcacgttctaacatatcaacttgtttaagtgcttcgctaactcttctatgcatttcgtcatgtggaaccgcatgattttcgagtccaaatgccacatcgtattttacaattgaaccaacaaattgattatccggattctgaaatacaattcctatgtcttttcttaacttttcaaaattatcatcagttatagcttgattattataaaaaatttctccagatttaactttctctatgccaatcattaacttggcaattgtagattttccagaaccgttatgaccaacaatagatgtccactgacctttaggtatactaaaagaaacatctttcaatgtgaaggatgcatcactttgatattgaaatgaaacatttttaaatacaataactgaattcttatcctccacttgtctctctcctttacgattcgtgtatctatcatattttacaatatttataaatcgctgtatatgacattgactgggttctctatatattactagtattttctgactcatttctagtctttaaagtgttgtttaacaactaatgataaggacatttattcctctctaacaattatgtataaacgttaataaaataaataatttactaacatagggttggccgcatttgattcaacgataatactttcacttcatttagttctagtgaaattgatcaaactaacttgatcatattttttagattcgcactcaaaaaagtagatataaagaaatcggacttaaaaacatttctgttcataagtccgatatcttattcaataaaaaagcgcgcaccccatcataagtttgttgagttcacgctttaaatctttatttagttgatggggtactctgagctagacaatatttgtatgtggcaaacattatcgttgcactcatttgctttatataaaagtagttagtgtatttatataaattcttatactaattcgataattactgattcagcaccgtcaccgcgacgagggccttgtttaaggatacgagtgtaaccaccttgacgttctgtgtaacgctctgcgatttcaccaaataatttttgaagtgcagtttgtgtagtttcatcttcgtttaagatttcaacattacgtaaagttttagctgcattacgacgagaagctaaatctccttttttacctaaagtgattaatttctcaacaacactgcgaacttcttttgcacgagcttctgtagtttcaatacgttcactaataataagtgatgtagctaagtcacgtaacatagctttacgttgatcagaagtacgacctaattttctgtaacccatgagttaacctcctttatcaatcttcttttcttaatcctaatcctaaatcttctaatttgtatttaacttcttctaaagatttacgacctaaattacgcactttcatcatgtcagcttcagatttgtcagctaactcttgaacagaattgattcctgcgcgttttaagcagttatatgaacgtacagataagtctaattcttcaatagacatttctaatactttttctttttgatcttcttctttttcaatcatgatttcagcgttttgcgcttcatcagtaagaccaacgaagatattcaagtgttcagtcattatttttgctgctaatgaaactgattcttgtggtgtgattgaaccattagtccaaacatccaatgttaatttatcaaaatcactgctttgacctacacgtgtattttcaacagtatagttcacacgttcaacaggtgaatacaatgaatcaacagggattacaccaattggtaaatcactagtattattttgttctgctaatgcgtaacctctacccttgttagcaactagacgaatttttaagtgaccacctttagatactgttgcaattttaagctctgggtttaaaatttcaacatcactatcatgtgtaatgtcgcttgctgttacttcgccttcatcacgtacatcaatttctaaagttttatcttcttcagagtaaattttcaatgctaattgtttaatgttcataataattgtagaaacatcttcaactacattgtctactgctgagaattcatgtaaaactccctcaatttcaatatacttaacggctgcacctggtaatgaagatagtaggatacgacgtaaggagtttcctagtgtagtaccgtagccacgttctagtggttcaacaacgaacttaccgaatttagcatcttcactaatttcaattgtctcaattctaggtttttcgatttctatcatttaaatatcctccttatatacgtcgacttaatttaaaatgtttgctcagtgacctgtaacaataccatcataaattatacacgacgacgttttggtggacgacaaccgttatgaggtactggagtaacgtctctgatcgcagttacttctaaacctgcagattgtaatgcacgaatagctgattcacgacctggaccaggtcctttaactgttacttcaactgtttttaaaccatgctccatagctgatttagatgcagtttcagaagccatttgtgctgcaaatggtgttgattttttagatcctttgaaccctaatgcaccagctgatgaccatgataaagcattaccgaactcatcagtgatagttacaatagtgttgttgaatgttgaacggatgtgtgctacaccattttcaatattctttttcactctacgtttacgagatacttgtttacgtgccatttaaaatttgcctcctttacctattattttttcttgttagctaccgttttaactggtcctttacgagtacgcgcgttgtttttcgttttttgaccacgaactggtaaaccacgacggtgacggataccacggtatgatgaaatttccattaaacgtttgatatttaagttagtttcacgacgtaagtcaccttcgactttataaccgtctacaacttcacggatgcgacctaattcgtcatcagttaaatctttcacacgagtatcagctgatacgttagcttcttcaagaattttttgagcagttgacgtaccgataccgtatatataagttaatgagataactacgcgtttttcacgtggaatatctactcctgcaatacgtgccatattaatttacacctctcttttattaaccttgtctttgtttgtgttttggattttcacaaattaccattactttacctttacgtttaatgactttacatttttcgcaaataggttttactgatggtcttactttcatttttatacctccctatattatggagtgacgattatttataacgataagtaattcttccgcgtgttaaatcgtacggagacatctcaacagttactttgtcgccaggtagaatacgaatgtaattcattctgattttaccacttacgtgagctaaaatctcatgaccattttctaattctactttaaacattgcgttcggtaaagtatctaatacagtaccttctaattcaattacatcttgtttagccattgattaacttccccctttttgcaatagtaaggtaatcgtcaatagacaactttattgttacgaatctatcagtgattaattttataagttaaacaaaaattacgggaattaattatcgttaattgccactctcatctatctaatatgattaaatcatgcctcacttaaaatagaccgctaaaagttgatctattacaaatgatctaaaatatcaatgacatctttggtaacgtcgctaatatcttttgaaccatcaatatttttcaatacacctttttgatcatagaaatctaaaataggcttagattgtttaatattaacactcaaacgattagctaccgtttcaggattatcatcttctcgttgatacaatttaccaccatcgatatcacaaataccttcgaccttcggaggattaaatacaagatgatacgttgtaccacatgactcacagattcgacgacctgtaagacggttcattaattcttcttccggaacttcgatattgatgacagcatcaatgtttctgtcaagctcagacataatattatttaatgcctcagcttgctcgattgttcttgggaagccatctaataaaaagcctttttttgcatcgtcttcagaaattctttccttaacgatacctacagtcacttcatcaggaactaattcgccacggtccatataagacttagcttctttacctaattcagtttcttcttttatagcttttctgaacatgtcaccagttgaaatgtggggtattgggaatttcttgacaatttcacttgcttgagttcctttacctgcgccaggtaaacccatcaaaatgatattcataagtgccctcctaaaattatctaccaccaaagcctttatattctttttgagatacttgagcttctaaagatttcattgtttcaatcgctacaccaataacgataagtaaacttgtaccaccaatctgaattgattgtggtaatcccataaacttagttgctaatattggtagaattgaaataacggctaagaagatagaacctacaaaagttaaacgatataaaactttagtaatatattttttggtttgttcaccaggtctaatgcctggaacatagctaccttgtttcttaaggttatcagccattttttccggattaacttgtacaaatgcatagaagtatgtgaatagtataattagtacaatatatacaaccataccaacattacttgaaggatttgcagcattcgcaatgttttgtgcccattctttatctggatagaacaacgttaatgttctaggcagtaagaagaacgccattgcaaagattacaggaataacaccggctgagttcacttttaaaggtagataagttgcctgtgaacctaatctttgagcagtttgtttcttagcatattgaatcggaattttacgaacggcttcaagtacataaatagcacctactgttaatagtatcagtgacactaaaagtcctaatactttcaaccatgctaatgatgtatcttcttgcccaacgaacgcagtttgtccaaattgaattagactggctggcaacgttgataaaatacccgcaaatatgataatagaaataccattaccaacaccgaactgagtgatttgatcaccaagccatattaagaaagcagttcctgctgtcaaaactagtgctattaataaataactcataattgactgattgataatcagcgcacctttgagataattattaaattggaatgccatacctatagattggataaatgctaaagaaattgctaaataacgagtaacgttatttaactttcttctacctacttcaccttgttttgcccattctgagaatttagggacaatatccatttgtaataattgcattacgattgatgcagtgatgtagggtacaatacccattgcaaaaatagaaaatcgtttcaaggctccgccaccaaaagtatttaataactcagtggcaccttgagaaccttggggattatcaaaagctgcaggatttactcctggagctggtatataagtccctattttaaaaattactaacattgctagtgtgaagaaaatcttgttacgaacctcttttgttctaaagaagttcacaagggtttgaatcattagatcacctcgtgtgctccacctttagcatcaatagcttctgctgctgaagctgagaatttatgagctttcactgtcaatttcttatcaagtgaaccattacctagtattttgataccagatttttcattcttaacaacaccagattctactaataaagctggagttacttcagtaccatcttcaaatttattaagttggtctaagttaacaatagcatattctttacgatttatgttagtaaaaccacgttttggtaaacgacggaataatggtaattgaccaccttcgaatcctggtcttacaccaccgcctgaacgagctttttgacctttgtgtccgcgaccacttgttttaccgttacctgtcgcaacaccacgtccaacacgattgcgttctttacgtgaaccttctgccggttttaactcatgtaatttcatttcggcacctccttgattatttttcttctactgttactaagtgcttaactttgttgatttgcccacgaatagcagggttatcttcaacaactactgaactgttagtctttttaagacctaaagcttcaacagttttacgttgtgtttcaggacgaccaataacactacgagtgagggtaatttgtaatttagccataactagttttccctccttaattgtataattcttctactgttttgccacgtaatttcgcaacatcttcagcatttttaaggttttgtaaaccatcgattgtagcacgaaccatgttgattggtgtgtttgatcctaatgatttacttaagatatcagtgatacctgctaattcaagtacggcacgaacaggaccaccagcgataactcctgtaccaggtgcagccggtttcataaatacgcttcctgaaccgtaacggccagtaattgtgtgtggagttgtaccttcaacacgtggaacaactactaaatcttttttagctgcttcaacagcttttttgattgcttctggtacctcttgagctttaccagtaccgaaacctacacgaccatttttgtctccaactacaactaatgcagtgaaacggaaacgacgaccaccttttacaacttttgctacacggttgattgtaacaacgcgttcttcaaattctttcgtctcttcttctctacgagccatgtatttgtccctcctttaaattaaaattctaatccgctttctcttgctgcttcagctaatgctttaacacgtccgtgatataaatatcctccacggtcaaatacgatttctttaatgcctttgtcagcagcttttttagcaattgcttcaccgactttagttgctaattcaactttagttgctgtagtagcaatgtcgctgtcttttgaagaagcttgagctaatgttacgcctttattatcatcaataatttgagcgtagatatgcttgtttgaacgatatacgtttaaacgtggcttttcagctgtacctgataagttagtacgaacacgagcatgtctttttaaacgcactttatttttatcaattttactgatcatttcaatactcctttctttagagtttatctattatttaccagttttaccttctttacggcgaacgtattcaccttggtaacgaatacctttacctttgtaaggctctggaggtcttactgaacggatgttagatgctaatgctccaacttgttcttttgaaataccttcaactttaacgactgtgtttttctcaactgagaaagtaatgttttcttcagctttaatttctactgggtgagaataaccaacgttaaggattaagtctttaccttgcatttgagcacggtaacctacaccaacaagttcaagtacttttacgtatccttgagaaacaccttgtaccatattgtttaataaagcacgagttgtaccatggtttgttctatcttctttagaatcagatggtcttacaacttcaattgtgttttcttcttgtttgaatgtcattctttcatttaaagttcttgataattcacctttaggacctttaacagttacatgatttccatcaaaagttactgttacgtcactagggatgtcaataattttcttaccaacacgactcatgttatggcacctccttattttttattaccaaacgtatgcgataatttctccaccaacattacgttttcttgcttctttgtcagtgattacaccttcagaagttgatactaatgcaatacctaaaccatttaatactttaggcatttcgctagcttttgcataaacacgtaaacctggttttgaaatacgttttaatcctgtgataacacgctcatcgttttgaccatattttaagaataaacgaagtacaccttgtttatcatcttctacgtattcaacatttttaatgaaaccttcactctttaagatttcagcaatttcttttttaatatttgatgcaggtaattctaacttctcgtgacgcaccatgtttgcgtttcttacacgagtaagcatatctgcgattggatctgtcattgtcattgattgttgcctcctttcagactcttttttattaccagctagctttacgaacgccagggatttggcctttgtaagctaattcacggaaacaaatacggcataatttaaatttacgatatacagaatgtggacggccacaacgttcacaacgagtgtattcacgaactgcatatttttgttttttttgttgcttagcaaccattgaagttttagccacttaattagcctcctttaaataattatttacggaatggcataccgaagttagctaacaattcacgagcttcttcatcagtgttagcagtcgttacgataacaatatccattcctctaactttacttactttatcatagtcgatttctgggaaaattaattgttctttaacacctaaagtgtagttaccgcgtccgtcaaatgcttttttagaaacaccttggaagtcacgtacacgtggtaatgatactgaaattaatttgtctaagaattcatacattctttcaccgcgaagtgttactttcgcaccgattggcataccttcacgtaaacggaaagtcgcgattgattttttagctttagttactaatggtttttgaccagtgatcaattctaattcttcaacagcattgtctaatactttagaattttgtactgcgtcacctacacccatgttcacaacgattttatctatttttggtacttccattactgaactataattgaattttttcattaagttttcagtaacttcagtgttaaacttttcttttaaacggttcaaagtgggatcctcctttcaacttgttattaattattagatttaatttcttcgccagattttttagcgatacgaacttttttaccatcaacaaatttgtaacctacacgagttggttcgtttgttttagggtccaataattgtacattagaaacatggattgctgcctctgtttctaagattccaccttcaggatttaattgagttggtttttggtgttttttcataatgttaacaccttccacaacgacacggtcttttttaggtagagtagcaattactttaccttctttacctttgtctttacctgcgataactttaacgttgtcaccttttttgatatgcatgtgggcacctccttatttgtattggttgttattaattaaagtacttctggtgctaatgatacgattttcatgaagttaccttcacgtaattcacgagcaacaggtccgaagatacgagtaccacgtgggcctttgtcatcacggatgataacacatgcattttcatcaaatttgatgtatgaaccgtcattacgacgaacacctgacttagtacgtacgattacagctttgacaacgtcaccttttttaacaacgccacctggtgttgcatttttaacagtacatacgataacatcgccgatgtttgctgttttacgaccagatccacctaatactttgattgtaagaacttcacgagcaccagagttgtctgctactttcaagcgtgtttcttgttggatcattagttaaacctcccttatctctaaacttgtattaaataattactgactcttcaacaatctctactaaacgaaaacgttttgttgctgataaaggacgagtttcttgaattttaacaatgtctcctaatttagctgaattgttttcatcatgagttttgtattttttagagtattttactcgtttaccgtataatttgtgtgttttgtaagtttcaacaagtactgtaatagtcttgtccattttgtctgaaacaactttacctacataaactttacgatcgtttctttcgctcacttttgtaacctcctcttacttaattattgattagccttactttgttcaatttctctttcacgagcaacagtttttagacgtgcaatcgtttttcttactgtacgaatacgtgcagtttcttctaattgacctgtagctaactgaaagcgtaggttaaaaagctcttcttttgaagatttgatttgttcttcgatttctgaagtggttaagtctctaatttccttagctttcatttgtttcaccacccaattcctcacgttttacaaacttagtttttactggaagtttgtgacttgctaaacgtagtgcttcacgcgcaacttcttcagaaacgccagcaacttcgaataaaattctacctggtttaacaactgcgatccaaccttcaaccgcacctttaccagcacccatacgtacttctaaaggttttttagtatatggtgtatgtgggaagattttaatccaaactttcccgccacgtttcatgtaacgtgtcattgctatacgagcagattcgatttgacgagatgtgatccaagacgttgttgtagcttgtaaaccaaactcaccaaatgttacgtagttaccgcctttagaacgaccagttgttttaggacgatgttgacgacgatattttacacgttttggtagtaacattattattttcctcctccactagtgttcttagtaggaagaacttctccacgatagatccatactttaacgcctaatttaccgtaagtagtgtcagcttcagcgtgtgcataatcgatgtcagcacgtaacgtatgaagtggaacagttccttctgaatattgttcagcacgagcgatgtcagctccgcctaaacgaccagatacttgagttttgatacctttagcaccaagtttcatagctctagtgattgcttgtttttgtacacgacggaatgaagcacggttttctaattgacgtgcgatgttttcagctactaaacgagcgtcaagatcaacttttttgatttcaattacgttgatgtgtacttttttatcagttaacgcatttaatttgttgcgtaatttttcgatttctgaaccgcctttaccaattaccataccaggtttaccagtatgaattgcaatgttgatacggtttgcagcacgttcaatctctacgtgagaaactgatgcttcttttaattcattatcaataaatttacggatttttaaatcttcgtgtaaaagtgaagcgaagtctttttcagcataccatttagcttcccaatcacggataataccaacacgaagtccgattggattaattttttgacccacagtattccctccttaaaagttaattaagcttctttagcttcttctttaccgtcacttacgacgattgtaatgtggcttgtacgtttgttaatcgcacttgcacgaccttgcgcacgtggacggaaacgttttaatgttggtccttcgttagcatatgcttctttaactactaattcatctgtgttcatgtcatagttatgttcagcattagctaaagcggacattaatactttttcaattactggtgatgaagctttgtttgttaattttaaaattgcaatagcttcagcagcatttttacctctgattaagtcaagaactagtcttactttacgaggtgcgattcttattgttctagcaaccgcttttgcttccattaggatgtcctcctctacttaatagatattatcttcttgttttcttgtcgtctgcaacgtgtcctttgaatgtacgagtaggagcaaactcacctaatttatgacctaccatatcttcagttacatatacaggtacgtgtttacgtccgtcgtatactgcaaaagtatgtccgatgaaattagggaaaattgtagaacgacgtgaccatgttttgattacttgtttcttttcgcttccttcttgagcttcaacttttttcattaaatgctcatcgacgaaaggtccttttttaatactacgagccatttgggcgcctcccttcttattatgtgcgtgcagctttaagccgcacacccaaataagttgattatattattttttcttacgtccacgaacgataagtttgtctgatgattttttaccacgacgagttttcttaccaagcgtaggtttaccccatggtgacattggagatggtctaccgataggagcacgaccttcaccaccaccgtgtgggtgatcgttagggttcattacagaaccacgaactgttggacggatacctttccatcttgaacgtccggctttaccaacgttaactaattcgtgttgtaggttaccaacttgaccgattgtagcacggcaagtagataagatcatacgaacttcaccagatcttaatctgattaatacgtatttaccttctttaccaagtacttgagcacttgcaccagctgaacgagcgatttgtccacctttaccaggtttaagctcgatgttgtgtactactgtaccaactggaatgttttgtaatggtaatgcgttaccaactttgatgtcagcttcagcaccactttcaacgatttgacctacttctaatcctttaggagcaatgatatatcgtttttcaccgtctgcatatacaactaaagcgatgtttgctgagcggtttggatcatattgaatagaatcaacttttgcattgataccatctttgttacgtttgaaatcgataacacggtattgacgtttgtgtccaccaccatggtgtcttacagtcaatttaccttggttgttacgtcccgcttttttcggtagcggttttaataatgacttttcaggtgtagttttcgtgatttctgcgaaatctaacgaagtcatattacgacgaccatttgttattggcttatactttttaatagccattgtcgcttacctccttaatggtaattgttttattagttaaataagtcgattgatccttctttaagagttacaatcgcttttcttcttttgtttgtatagccttggtaacggcccatacgttttttcttaggtttgtaattcatgatattaacacttgcaacttttacgttgaagatttcttcaacagccatttttacttgtgttttgttaacacgagtatcaacgtcgaaagtgtatttgtcttcagccattgcttcagaagatttctcagtgattacggggcgcttaagaatatctcttgcttccattatccgagcacctcctcaacttttttagcagcagcttcagtaattactaagctgtcagcattagtgatatctaaaacatttaaaccttgagcagttgtcacttgaacgccagggatgttgcgtgctgataattcaacatttacatcttcgttttcagtaactactaatacttttttaggttgttctaatgtagataatacatttttgaattctttagtttttggagcttcgaagttgaatgcgtcaactacagttaagccattctcttgagctttgaaagataatgctgagcgtaaagctaaacgacgcattttcttaggcattttgtatgcataacttcttggagttggtccgaatacgataccaccgccacgccattgtggagcacggattgtaccttgacgagcacgacctgttcctttttgcttccatggtttacgtccgccaccgcttactgctgaacgattcttaacagcatgcgtaccttgacgtaatgaagcacgttgtaaattaatagcttcgaataaaacgctattatttggctcaataccgaatactgcatcgcttaattcgattgaacctgatttagttccgtctaattttaaaacatcataattagccattatgcatttcctcctttcacttcttattatttattaccttttttaattgaagttctgatttctactaaaccttttttaggtccaggtacgttaccttttactaagataactttgttttctgtgtcaacttgaactacttctaagttttgaacagttacagtgtttccacccatacgtcctggcattttttggcctttaaatactctagaagcatctgaagccatacctacagaacctggtgctctgtggaaatgagaaccgtgtgacataggtccacgagattgtccgtggcgtttaattgcaccttggaaacctttaccttttgatacgcctgttacgtcaataacgtcgccagctacaaaagtatctactgagacttcttgacctacttcgtaagcatccacgtctacattgcggaattcacgaatgaagcgcttaggtgctgcgtcagcttttttagcgtgaccttcagctggtttattagcatatttattagattttgcatcttttttgtatgcttttttgtcttcaaatccaacttggattgcgttgtatccatcaacttctacagttttcttttgtaatacaacattttctttagcttctactactgttacagggattaattcaccgttttctccgaatacttgtgtcatcccaatttttcttcctaagattcctttggtcatcgaaagtccacctcctaaaattgtctattataatttgatttcgatgtctacaccagatggtaagtttaagcccattaaagcgtcaactgtttttggtgttgggtttacaatatcgattaaacgtttgtgtgtacgttgttcgaattgttcacgtgaatctttatacttatgcacggcacggatgattgtgtaaactgatttctcagttggtaacggaattggtccagaaacatctgcaccagaacgtttcgctgtttctacaatcttctctgctgattgatcaatcacgcggtgatcataagcttttaatctgattctgattttttgttttgccataattttccctccttattcgtctacatttagtgatagacttctccacgaaaactatcttacacagcgccatggcaaagcggccgggtgtgtcagtaacctttcgcttcatcgcttttcttaaagtccaacgttagttatattacacgaaaaacatcgataaatcaaggcttttcacataatttttctatctgtctaacacatacttttatattttactttatatacttagtcagttcaactattttcgagatattttttatttccttctttattgtaaattcgtaccttgaatcattttattattatcattgaaaattattctatataattagtcataagaacggtggtgaatgaatatgaaaaatggaccaaaattatctttagcacttataggtatctttttaatactttgtgagtttttctatggcattccttttttaggtgcaacgtttattttaagttttggatggcagcctttaatctttaatgcattactttatctaattcttactattatattattagtgaatagacaaaatgcgattagacctatagcgattattccaatatttggtatagtaggtagttttttagctatcatccccttcttaggaattttgattcattggattttatttttcctaatgattctatttgtcctagttgtattatcagcgccaacctatatacctaataaaaatgctcgtgtcatttacacacaatacaaagatggacatagagaataattcttaaaacctttttaattaggtatataatatagaagaaacacgtccaacaattttaaaagaagtatatttatatcggatatttaaagacattcataatattgctttatgttatttcgcttcttattttatccttacttcaaagaaaaaacgactaccaatcattggcagtcgttttttgtgtctggatttaaccatgaacaaatatgaagtacagaatgaatagtaccattaatacatacattatcggatgtacttctttatgttttttagagataagcattgtaattggatagaaaataaatccacacgcaataccagttgcaattgagtatgataaaggcatcataatgattgtaatgaatgctggcactgcaacttcaaaacttttccagtttatctcagcaaagtttgcagccattaatacacctaccaccactaaagctggtgtcgtaactgcacttgttacaacagcgattaacggactaaagaacagcgctaataggaaacaacaacctgttacgatactagcaaatcctgttctagcacctacagcaacacctgaagttgattcgatataagaagttgttgtagttgttccaaaaactgatcctacaatcgtagctaaagaatctgagaacaatgctctaccagctcttggtaatttattatctttcataatacctgcttgagtagcaacagctactaatgtaccagctgtatcaaagaaatcaataaataagaacgttaaaataacaattaagaactgtatcgttaataattgacttgggtctttaaacgcttcaaatgcagcaccgaacgttggttcaatacttggaatcttacctacaataccagatggcatttgaatcaatccagtgaacataccaacgattgctgtgatgatcataccgataaagatagaacccggcaatttaattgcatataaaataactgtaataacgataccgaatatcgccaaaagtactggtggatcagttaaatgtcccaatgttactaatgtagattcatttttaactataatacccgaactttgtaaacctacaaatgtaatgaataatcctatacctgctgaaacagccatcttcatttgataaggaattgcattaataataacttccctaaaccctgtgacggttaatatcgcaaagaatatacctgagaataaaacgcctgttaaaccaacttgccaaggaatacccatggttaacacaacagtaaatgcaaagaatgcatttaatcccatacctggtgctaacgcaattggatatttagctattagccccatgaatagcgagcctacaaatgctgctaatgcagtcgctacaaaaatggcaccttggtccattttcatatcttctgatacgcctttaacacctgctaaacttaaaacttgcgggttaactgctaaaatataggccatagataagaaagttgtgataccgcctaagatttctcttttaaagtttgttccatatttatcgaactggaaatagtttttcacgaatggatgctcctttttttaaaataccttaatagtttaatatcattcttaataaaaaacaataccaaaagcgaacttttcgtttttctgattcaactttgttcgattttatctataaattcaagttctttaatgcatctttaaacggattattgtctaaaccttcatttttattcatatactttttcatttctttacgagatactttaccagaggatttagacttcatacgctgatccatatgtgcttgcgtttcagaatgtccacaaacacaacgatataccgcttctttccctttaccaaacaacgttaatttctttttacagtttggacatcttgcatttgttttgcgctgtacattctttttcgtcttacaagatggatcttggcacacaagcatctgaccatttttagttttaactttaatcatgaatttaccacacgttgggcattctgtggttgttaaattatcgtgtttatatttacgatcactatttttaatcccatttacaacatctttcgtaaaatctttcatttcattaatgaatgttttcgcctgatatttaccacgttcaattaaaagtaatttttcttcccattgtgcagttaaaagtggcgacgttaattcttctggtgctaattctaatatttgtttaccttttgacgttactttaattttaccgtctcttgattcaatggcattcatattaaataatttatcgataatgtcggcccttgttgcaactgtgccgataccacctgtttgttttaaagtttgcgcatattttttatccttcaattgaataaagttctgagggttctccatcgcttttaataacgaaccttcattaaaatattctggaggtgttgtttcatgttctctaatatttgtttttgaaatcttcacttcatcgccttctgaaaaaggctgttgcatctctgtaatagattcaccttgtctaatagatttaaaacctaaaacagttgttacattctctttcaaaacaaatgtgtgccctgcaacctctaaagttacagttatcgcgtcatactcgtgcggaggcattaaagcttctaaaaaacgctcgacaatcatatcgtataactttaattctctattacttaagtctgacatgacaggtctcacttctgtaggaataattgcatggtgatcagatactttttgattattaaatatcgacatttttgatgaaaatgttttagacattaatgggcgtgcttggtctttatatgttgttgccatcgtcgcctgaatacgttctttcatagtatctaccatatcagttgttaaatagtttgaatctgttcttggataggttacgactttatgtctctcatataagctttgaagtgtattcaatgtttctttaggtccaattttataacgtctatacatatcttgttgtaaatctgttaaattgtacagtgattgcggatacgacttcttatgtttagtagcaacagatttaatcttaccatcgacatttttcaaattattaaccatctgttctaaagtttctttattggtatatcgctgatttgattctagctgaaaatcaaacccttttaccgttaatgataatgtaaagtattgttgtggtttgaactgattaatctcttgttgtcgtgtatttactaattgaatcgttggtgtctgaacacgtcccagggatagctgtgcatcatactttgttgttagtgcacgcgttgcattaatcccaacaatccaatctgcctcacttctcgctaacgctgcataatacaaatcgttatattgacgaccgtcttttaaatttttaaaaccttgttgaatagcttttttagtaactgagctaatccataatcgacggattggctttttgttaccaactttatccaaaatcaatcttgcaactagttcaccttctcgtccagcatctgttgcaataataatatctttcactttattatctaaaattaacgcttttactgttttaaattgtttgcttgttttaccaataacaacagttttcatatatttaggtataattggaaggtcttctaatcgccattcctttaaatttttatcgtattgttcaggtgtcgcatttgtcactagatgacctaacgcccacgtgacaatatattggttattttcaaagtaaccattacgcttctgatttatttgtaaagcatcagcaatatctcttgcgactgatggtttttcagctaatattaaagatttcataaattatcctttctcatacgttcttttatttcgaacgtgcttcatctattccactaatctttgatttaaattcaatgattgcaaatgatgtgttaaatgtattgtaacatgttaatatcactattaactttcatttcagttgaaatactatataataaaagtaacaaaaagtacggaggtaatgacatgagcatagttcagttatatgatattacacaaataaaatcgttcattgaacattcgaattatgaatcagcatcatacttatataaacttcctcaacagtacaatgaaatagatgtattaataaccgatgcgattgaatcacctggtgtattttcgattaaagaaaacgattcaatcaaagcaatcatattgtcttttgcatacgataaaaataaattcaaagtcataggccctttcgtggctgacaattatgtattatctgtcgatacgtttgaaacgctatttaaagcaatgacttcgaaccaacctgacgatgccgtctttaacttttcttttgaagaaggcattcaacaatacaaaccattaatgaaagttattcaagcaagttataacttcactgactattacatagaagcccgtacaagattagaagaagatatgcaccaaccaaatatcattccttatcacaaagggttttatcgtgctttcagcaaattacacacaactacatttaaatatcaggcacagtcaccacaagatatcattgatagtttagacgaccatcatcatttgtttttatttgttagcgaaggtttacttaaaggttatttataccttgaaattgattcacaacagtcaatcgccgagattaaatacttcagttctcatgtagattaccgtttgaaaggtatcgctttcgagttgcttgcgtatgcattgcaatatgcttttgataattttgatattagaaaagtttattttaaaattcgtaataaaaataataaactcatcgaacgatttaatggtctaggtttccatatcaactatgagtacattaaattcaaattcgaatcacgtaacgtaaaagatcaaacaatccctgaataaaacaccaagcaaataccctacagtacatcattagcatgtattgtgggtttttctactttttgtaaatattgaaaattataagtagttgttttttactattagggcagaatgctttacaataacatgcaagtgtcaattaaggggagcacttgcataaatagtataggagagtgagtagtcttgcaatttcttgatttcttaatcgcacttttacctgctttattctggggaagtgtcgttcttattaatgtgttcgtcggcggtggaccttacaaccaaattcgtggtacgacgctaggcgcactcattgttggattaggtttacttattactggtttcgcaaaattcaataatcctactgtaattattgtcggtcttatttctggtgcattatgggcgtttggacaagcgaatcagcttaaatctattagtttaatcggtgtatcaaatactatgccagtttctacaggtatgcaattagttggtacaacattattcagcgttatctttttaggtgaatggtcttcaatgactcaaattatctttggtttaatcgccatgatattattagttactggtgtagcacttacttcacttaaagctaaaaatgaacgtcaatcagataatcctgaatttaaaaaagcaatgggtattttaattgtatctacagttggatatgtaggtttcgttgtacttggtgacatctttggtgttggtggaactgatgcattgttcttccaatctgtcggtatggcaattggtggctttatcctatccatgaatcataaaacatcacttaaatcaacagcacttaatctattgccaggtgtgatttggggaattggtaacttgttcatgttctattctcaaccaaaagttggtgtagctacaagtttctcattatcacagttacttgttatcgtttcaaccttaggcggtattttcattttaggagaaagaaaagatcgtcgtcagatgacgggtatttgggcaggtattattattatcgtgatagctgctataattctaggtaatttgaaatagaaagttaaatactcatgtaacgtaaaaatgtaatcacttctgaaaataaccattcacttatagaatgattaaaattaattttcgggaattttacgttgaatgttcctctatatgtcctaggaaatacgtggctctaaaaacaaatcgcaataacacatcatgacattaatcatgcgttttaagactttaaaattagcgatacttttaaaatcttgatgatattcatttatcaagtatgcgccatacatatgaagtggatagctgcataacgcactgcattatcaacttgaatgtatgagttgaacaactatgtcataaataaaagcccccttttcacaatatgcatttacatgttgtagtaaagggggctctcattttcttcgactattaaaatggattttattttcaaatgtgaaaactagacaaacactgcctgatacacgtacaaaataatgatactaataatgattgtcaaattggtcgtcatacctataaatggcagtgttcgatatttaaactgaataccataagaaataattgcaacacctaccgggaacatccaagtgaccaacaatgtcgtcttaatcatatcatctgatactggtaacaacacatatactaacaatcccgcaactaatgctaatccataatgcaaacataaatatttaatagtagcaggtatatactttctttccagagtaaaattcaacatgacacctagcaaaatcattgataacggcatatttgcatgggaaagtatgctaaagaaatcgattgccacatgtggtaaatggatgtgacttatattcaatataaacattacaatgtatgtaacgagtggcactgattgtaataatttcttacctaaatatttaaaatcgaattgatcactaccttcactaaagtagctacctacaaagtaagtaattccaaacatcacaaaggcaccacctatatcagccataccaaaataaataagtcccgttttaggccatatcacttcaattagtggatatgcaaacaatccaatattcatagcaccagtcatcatacctactgatccacgcatgtgattatcatattttctaaaaaaccagacagcaatcattttcgccacaataccatatataatcattaaaattggtaaaatggagaatgacaattttaattctgcactgtttaaattcacaataactaaagatgggagtgtgacattaagaactaatgtagcaatgacttgactatctgttgcttttataaaattaatgcgcttcaaaaagtaaccaagcgcaattaataaaataatcatagtaaattgttctgtcactgttatcccttctttcaataatcttcataatttataactttaacatactccacagatattttagaagtctactgtttcatgctataatctacattaaatgcacttaattatatttcaaaggagtgttatagtatgtctttagaaaaccaactagccgaacttaaatatgattatgttcgtcttcaaggtgacttagaaaaacgggaatctttgaatttagatacttccgcacttgttcgtcaacttaaagatattgaaaatgaaattagaaacgttcgtgctcaaatgcaagattaataatctatcattcaagcaataaatgctttttgttacataaatttgactagcattgctctgaatacgttatattgatgaattgcttcatttttcgctcaattacatctagaatcacaaggtgttgtcgtgttatgatttagtgtctctttaacaacatacacgcatatctatcccaacactgctatttatgttttctacgctgctgtactacatgaaccctttgaaacggagaggaagttatcatatgcaattttatctgattttactagcaatactttatctaattgttagttttattagtatttttaaaatggaagttgtatttactcgcattttgagaattattatgggtgtgttgttattattcgtcttagcattaacgacgatgagttttccaaaagagaattggtgggtatttatcgtcttattactcttagtcggtaatgtcgaagtgacaggatttaaaatgcttaaaaaagatctaaaaggcgtaaacatcttgaatttaatgtcattatttatctttgtcatatatttcatcttaaccatcgtattattctaagtaataaacaaaatatgcaataacataattgcaaccttattttattatcggattacatgttgaatgccagtattgttttattaacacatcgattaaatcgcacgtgaaataaggtctaaaatttcaaattttaaaaagccataaaagtagtcaatatcatgaccgcttttatggcttttatattatctatcgtttagtgaatcgtttttttaaagtaaagagaatttcatatattactggtacaactacaagtgttaataaagttgatgaaattaaaccaccaataactgtagcagctaatcctttcgaaataagaatcgagctatcttgaccaaataacaaaggaactaatgcaccaattgttgcaatcgccgtcattaatatcggtctaattctagtaccgcctgcttcgattaatgcttctttcatctccatgccctgttgctcattattaataacacggtctattaacacaatggcatttgttactacgattccaattaacattagcataccaattaaacttggtactgatattgtttctcctgtgattaatagtgcaataattacaccgataactgtaaatggtaaagagaataaaattgtaaatggtgctaggccacctttaaatgtaataactaggattaaatatacgataatgattgcagctaacattgcaaaggctaattgtgtcattgcattgttaatatcatctgatgcaccaccgatattaacctttacattattcggtttgtccaaattatttattttagacatcacttgtcgtgttgtgccacccacatctttatttgttactttagcagataccgtcgttgcataatctccttgttcttgcgttaatttacttggtgtcgttgttttaactaacgtagcgatatctcccaatttaatcgtaccaccagtcggctttttcaaagttatattattcaacttatcttctgaccagtctgtttgcttattttgtttgactttaacatcaacagttttaccattttctttaacagtcgtaactgttttttctggtaagttttcattcaagtgcattgcaagttgacttgcagaaataccattttctgccgctttattttgatcaactttaatttcatactgatcatatgtttgcgataaatcagatttgacattggctagtcctttaacctgtttcattttctgttcaatatcttttacagttgattttatggcatccattgatgggcctttcacagtaacctctacagatttattacctgcacctgttcctaaatcttgatttttccactctccaggatgtttaaagccatctacatgtttaataaccttatccgcttctacatcaaaattaggcgtgtcattatcatattcaaccatgattgccatactatttgtactacccgttggatctactggactactaccaccaactgagtattgaattgtttttacatgctttttctgttttaaatatttttcaacatctttcgcatgattcaacactgcttgctccgtttcaccaggcttcggtgtataagtaatagctaaaaatttatcgtcacctgctgaaataaagctagtgcctagtctcggtcctccaaatacaatagttgcaaccaaaattaatgtacttaatataattacaatccacttatgatttagtgaccaatgcaatacttttttataagttgtactaacaacacctaatccttcttgatgttgtttattacgacgtttaacgccttttttaaatagtgttgctgccaaagctggaacgagtgtaattgacactaataacgatgctaataaactaaatgcaatagccaatgcaaaaggtctaaacatttcgcctactgaacctgatacaaacacaagtggtaagaagacgataatagtaactagtgtcgatgacattattggtttaaatacttcagttgtcgcactgataattaaattttcaccttttagttgttcttctgaatctgttaagcgtcgataaatattttcaacaactacaatcgaatcgtctatcacacgtccaatcgctactgttaatgcacctaacgttagtatattcaatgaaacatcactcaatttcagagcaataagcgccataagaagtgataacggaatggatataatagaaattgccgtcgtacgaatgtttcttaaaaacagcaaaataactataattgccacgattgtacctaatgatgctttttcaaccatcgtataaagtgatttctcaacaggctttgcagtatccattgtttttgtgacattaaaatctttattttcatcaacgaatgtatcaattttacgttgtacatctttggctacttgaactgtattggcatcttgagctttagttatttgtagattaaccgcatcctttccattcgttttagaaatagaagtacgcacatcaccaactgtaatatcagctaaatctcctagtttcgctgtcggcataccacttatattatttgatgctgacgcttttgaattttgctgtggtgatgcctgattaacgtctgacatggctgaattttgtttattgtcactttgggattgagattgcccttgtcctcctgccaacgttaatggaatatttatgtttttaaaagcatcaacagattgatattgaccatcaacaacaattgatttatctttatcaccaaattggaacaatccaagtggtgttgttcttgttgccgtttttagatagttttctacatcatcagcagtcaacccatatttttcaagttcattttgcttaaatttaagggtgatttcacggttcgtctgcccatttaattgcgcattttgcacaccatctaccgtttgtaattttggtattaattgttcattcagtactttcgttacttttttcaagtcattctctttatttgaaaatgaatatgctaaaactggaaaagcgtccatcgaattacgtcttaattctggttgaccaacttcatctttaaatttaattttatcgatttcttttttaagctgttcttctgctttatccatatctgtattattttcatattcaactgttacaattgaagcattttgtatggattgcgttttaacatttttcacatatgccaacgatcttacttgattgtcaattttactacttatttcatcttgggtactttgtggcgttgcacccggcattgttgttgtaactgaaataactggattttgtacatttggtagtaattctaatttcaatttagcactcgcgtatacaccgcccaagacaactaaaacaaccattaaaaagatagcaaacttattccccaaagaaaattgtaatagcttttttatcacagtacttccccctctttcactatattcaaaaatattttactcaaccattctatattgtgtaaaaaatctgaacgcaaatgacagtcttatgagcgttcagatttcagtcgttaatctattttcgttttaatttacgagatattttaattttagcttttgttaaacgcggtttaacttgctcaattaattggtacaatggctgattcaatacataatcaaattcaccaatcttttcacttaagtatgttccccacacttttttaaatgcccataatccataatgttctgagtctttatctggatcattatctgtaccaccgaaatcgtaagttgttgcaccatgttcacgtgcatacttcatcatcgtatactgcatatgatgatttggtaaaaaatctctaaattcattagaagacgcaccatataagtaatatgattttgagccagcaaacattaatagtgcaccagaaagataaataccttcaggatgttccttttctaaagcttctaggtctcgttttaaatcttcatttttagcaattttattttgcgcatcattaatcatattttgcgcttttttagcttgcttttcagatgtttccatcttctgctgccatttagcaatttcggcatgaagttcattcaattcttgatttactttcgctatattttcttttggatccaactttactaaaaatagttcagcatctccatcttcatgcaacgcatcataaatattttcaaagtaactaatatcacgcgttaagaagccatcacgttccccagtgattttcattaactcagcaaatgtttttaaaccttctctatcagatcgttctactgtcgtacctcgctttaaagccaagcgcacttttgaacgatttcggcgttcaaaactatttaataactcatcatcatttttatcaattggtgtaatcatagtcatacgtggttggatgtagtcttttgataaaccttctttaaatcctttatgtttaaaaccaagcgctttcaaattttgtaaagcatctgtacctttatcaacttcaacatcaggatcgattttaattgcatacgctttctcagctttagcaatttcttttgcactgtctaacaatgcatttaacgcttctttattactataatcaacaacaaaaccacgcgaaatataacatagcgtataaggtaatttaggtacttttttaaaaagtaattgcgcaacaccctgaacttcaccgtcacgacctacagcgattcttcgcgcgtaccatccagttaatttctttgtttctgcccatttcgttaattgtaataaatctccatttgggtgagatttaacaaatgcgtcatgttcctgattagtgatatgcatcttttccatgatttatgatatctccttctatttaacaatacctttaattatacagtttgtatcttatagtgtcgattcagagcttgtgtaagatttgaactcttatttttgaaatgtccatgctccaattaatagtttagcaagttcaaatttacccattttaattgtgaatcattttatatctatgtttcgtgttaaatttaatgttatcgtacaattaatacttttcaactagttacctatacttcaatatactttcatcatctaacacgatattcatttctaaaatgaaccaacttgacttcaatgaataaatttttcctcaagcaaccacattaatgttcatatacaattacccctgttataatgtcaataatctaacaatgaggtgtttgatatgagaacaattattttaagtctatttataattatgaacatcgttgcaatcattatgacattgagtcaacctctcaccgtgaattactttagtttacgggttatacttatctttttcacatttatattatcaatctttttcattttaattaagtcatcacgattaaataatatattaacgattctttccattgtgcttgccattattcatatgggcattctcgctcatagcacttacgtatatttatactaatggttcaaagcgataaatagcacctctgataaaaattgaatatggtgaagttgcttgtgcgtcttttatgataaccgaatgatattttgaaactttaccatcttcaattctaaaataaatatcatcattttttaaaatcaaatctgtgtaatggtcattctcttctacaatgtccatatcaaaccatttcaaccaattcgatactgtttgtgattggtttttacttttcacaataacagtttcaattgcaaattgtttttgaaaatatttttgcaattttttagtacgcatggaatcactttcttcccattgaataaaaaatggtggcttaatttcatcatcatcctgattcattatataaagcaattgccactttaccttaccatctttatgtgtatctctttccatttgaatcggacctactacttcaacccgctcactttgtagtttatttttaactgcctcaatatcatttgtacgcaaacaaatatttttaaagccttgctcatacttctcttgaacaatttgagtagcgaaagcgactccaccttctatcgtttttgccatctttttcaacttttcattattttctacatctagtagctcaatataattttcattgatataacctaatttattgaatgttccatatttatgatgatacccacctgaatgtaattttataacatctcctggaaaactaaaccgatctaactgatctatataatgaatgatgtgatcaaatttcaatatcattagtatccccctatttacatgtaattacgcttattttaacaaagtataattatttttgctcttaataattatatattgatttctaattgctcccgttttataattactattgttgtaaaaaggttagctaagctaactattttgtcttaggagatgtcactatgctatcacaagaatttttcaatagttttataacaatatatcgcccctatttaaaattagccgagccgattttagaaaaacacaatatatattatggccaatggttaatcttacgcgatatcgctaaacatcagcccactactctcattgaaatttcacatagacgtgcaattgaaaagcctactgcaagaaaaactttaaaagctctaatagaaaatgatcttataacagtagaaaacagtttagaggataaacgacaaaagtttttaactttaacacctaaagggcatgaattatatgagattgtttgtcttgatgtacaaaagctccaacaagcagtagttgccaaaacaaacatttcgcaagatcaaatgcaagaaaccataaatgtgatgaatcaaattcatgaaatattattaaaggaggcacacaatgactaatcaaggctcattaaataaatcacctattttcaccaaaagttttacaatcaacttttttgtcaactttatcgtatacttatgcatgtatttgttacttgtagttattgctggctatagtaagcaagctttcgacgcttccgattcattagccggattagttgtaggactatttattgtcgggtctttaattggtcgatttgctacaggtaaatttgtaaatcaaatcggacctaaacgattattatttattggtttaattgctttaattatcacgcaattactttattttattgatggatctttagcttttttaatctttgtacgtctcataaacggtatcgcaactgcagttgtgacaactgcaacaggtactattgcggcatacgttacccctgttaatagaaaaagtgaaggcatcagtttattttctttaagtttagtattaggtacagcgattggcccatttctaggcatgttacttattacaaaatacgcaattgatttactgtttattatttgtgtcatattaggcatactcggactcattatctcattatttataaaagttgatttcgaagtaacaaataacaaaactgaaactaaagtcattgataaaccaagatttagtattcatcaatttattgcaaaagaggccattcctgttgctgtaattatgcttttaattggcgttacctatgcgtccatcctaacttatttacaagcatttgctttagagcgacacctagtaactgcagcaagctatttctttatttgctatgctatagcatcgttaattactagacctattgctggtagattgatggatgataaaaatgaaaatattattgtctacccagcatttatcatgcttttcctttcatttgtatgcttaatttcaagctatcaaagctggttaatattacttgctggggcttgcctaggtttagggtatggaaatttatcatctgcaatgcaatctattgcgataaaagtctcacctccgattaaatatggtatcgcgacatctactttttacgttggtctagatgcaggtgtcggcttcggtccatcattccttgggttatttactcatatgttttcatatagtgaaatcttcggctttatggccgctttagcaatcattactatgcttgtttacttcttaattcatggacgtcatgtaactagaaatgccatgaactaaatatttatattcaaaaataaaaagcatgccaatctctattcatcatttgtctgtccccaagacgcaattatgatgtactgattggcatgctttttaagtttttagtttgtaacgcttaacacttctatttctttagtaattttatctaacaatttcttttgagaagtactatagaaatagaatacttgtctttcatccgtttcagaacgcaatttagaaataagctcttttttatagattttacggataatcacatcgattttacttgtatcccatagcatttcaaaatgtaatgtatccctcaattctttaccgctaatcttttcagcttcatacactttaaaaagtactacaaattcttcaattgaaatcttatgtgttgtttttaaccagtgctttaactgacttaactccctttctgcttctataaaacgttgaactttattactcataatatgatgcctcctatgtttcttcttagatgtttgtaattcatattattatacaattacttaaatttattatatatcaaacttagcattttatctattacaaatattaaattgctggctatatcttgtttagatttatatcttttggacaacttgttgtttattcgacaacatttatacctaaaaaagatatattacaactcaatgacttggagtgtgacaacaatgttaaagagcccttaaagatttattatgtagtgatttttgggagtgggacagaaataaccttttcacaaaatttatttcgttgatccccaacttgcattgtctgtagaatttcttttgaaattctctatgttggggccccgccaacttgcacattattgtatgctgacttttgtcagcttctgtgttggggccccgttccgcaacttgcattgtctgtagaatttctttttgaaattctctatgttggggccccgccaacttgcacattattgtatgctgacttttcgtcagcttctgtgttggggccccgccaatttgtaaaaactttaaaaacgatcatttctattaaatctggcatagatatgaccgtttttactttaataaataatattgtattttagggagtaagacagaaatattaaagaatctctaatgatttaatatgtagtggtccctacacattaaccaccaatataattcatgtttatctttttacgttgacgattggcaactgtttgagcagttctctcatctgaatatcgatcatctcttatttgccataaagctttaaattgttcttttaattcttcgtcggtcacgccagaacgaataaacgctttaacgttaaatccatcgacagttgcaaataaacatccgtaaaacttcccatctgatgacagccttgcgcgtgtacatgtagaacaaaatgattgtgaaacacttgtaatcaaaccaaattgaacaccattatccttatggcgataatattttgctacttccccaaaatattttggttctacaggatcgatttcaaagtgctgctctatcattgtaagcatttcatctttagttacaactttactgaaatcccatccattatcattaccaacatccataaattctataaatcgaatctctatatgtttatctttaaaatattcaagcattggtatgatttgatcatcgttaatacctttttgtataacaacatttacttttacattcaaaccaatagacgtcgcgtaatcaatttgttctaaaatcgtagtcgctttaatattacgattattgattgattgaaatagcgtatcatcaatagcatccaaactgacattaattctgcgcagcccagcatcatataacttttgtccatgcttttttaataacaaaccatttgtagtcaaaccaatatcttcaataccatcgatttgatttaatttagctataagtacatctaaatcccgtcgcatcaatggttctccacctgtaatgcgtattttttttacacctaattctgcatataccttagcgattctagccatttcatcaaacgttaaaagttcatttttaggtaaaaatacgaaatcatctccaaatacctctttaggcatgcaataatcacacctaaagttacaccgatctgtcacagataaccgtaagtcacggatgggacgtcctagtttatcttttatttgttctaccatttgtggacctcctaacagcttacaatttttgaattaaagcgtccaaatcatgctgataatttatatttttgtaccaatatgagggcgcatctacatcccttacatccaaataatccgttgataattcatgatatacatttttaaaactgtaattatcagaatgtagtgctttagttatagcgcctaatgcattcggactataaaatgcaattgttggaataaaacgtccatcttctttaaaagctgcgacatctaaatgattttcaataagatgagaaactaaaaactgatacaacgtgcttacagctttaccagtaatcattggtgtatcaacagaaacgacaaaaaacaattcttcttcaggatgttgcttcatgattgtataaattcctgctaatggacctttatcattatgattctcatcatctataacaacatttggatatttaaattgcgttgccaattgcgcatttgtactaataataatttcattgaacatatttgttgattctaatgtcttaattactctactataaaaggtctcaccgttcacttccgcaaaagctttgggcttaccaaatcgcactgaatgaccacctgcaagaattattgctttcatgctcccttaacctccactaaccggtggaattaatgcaacagtatcattaggttgaatgaaatccgatttttgtacaaattcctcatttacagcaacttgaaactttttattattgatttgcggataacgttcaaacaataaatcttcaaattgttgtacagtcaatgcttgttcaagcacaatatcttcctgtgctttttgtaatatatctttaatttctgcgaagtaaagtaccttcatctctcttattcctccctcttcgcttcttcataattccctttttgatgcccttgccattttgaaccatcttcccaaatttcttttttccaaatcggaacaatttcttttatacgctcaattgcatattcatttgctcgataggcatctttacgatgcggtgaagaaaccgcaattaatacagcgatatctgaaatttgtaatggccctattctatgaacaatactcgttatcgttccaggccatttttcatttatttcatctccaatttgtgccaatttcttttcagccattggaatatacgcttcatattctaaatattccgttttgacgcctttagtccattcgcgaacatgaccggtaaaaacaactactgcaccttgatattcatttatagtgaattcacgatattgttctgtttgtatcggttctgtcacgatttcaaattgtttcattcatttcaatcctctatgttaattgtgtatcacaatcatttttaattttatttaataaccattgctcaaatgctgtaaaatcttcatgctcccttacattaatgctataacaaacattcgacaattgttgtaatacttgcaactcttcttcatttcgatagactacgactttttcaaaatcagcatttttaaagccttcaactaatacgatattggtgtcaattgtaacagatttttcaataatttgagtaagattttgattatctacacgtgttacagtttgctgatattgaaaaccttgtacaatactttgatctgcccccgcttcaaaatgcttcatgtgatcgacgtctgaatcctgtaattgaatatcttccttaccatgcccatgatgtttaatagtagcaactgtataaccatatgactttaagaaagagacaatatgcctcatcaatgttgtcttaccagactttttgtaacctacaatttgtaaaatcataaaagaagttcctcttcagcagcgtcagattcagtcaatataatatctactgtatgccccgctttaaaaccacgtgaccctcctggtaacatgaccatacagttagcatgtgcaatcgctacaaccgcacctgatttattgaatcctgaaggtactacagtagctccagcacttgttaacgttgctttagcacgtataaatcgtgtgaatgggtttgccttggtaaaatcttccattaatgttgctttaattatttgcgggaagacttctagtgcgccacacatatgtttaacagctggtttcacaaatagttcaaatcctgtaaaacaagctgatggatttccagataatccaaacaaatactttccatctgcaaatgcaaccgttgttacgctaccaggacgcattgctactttattaaataacacttccgcctttacagccttataaatctcaggtaaatagtcaaaatctccaacagaaactcctcccgttgtaataacgatatcatgtttttccatagcttctttaacgacttgtatgccactatctaaatcatcttgttgtgttttgtaaataccaacttcaagacctaatttttctgctaaggcacgaatcattgggccattagagttacgaatttttccatcttctaatacatcattaacatctaataattcgcttcctgttgcaataacagcgacactcggttgcttaataactttaacctctgcatagccatatgttgcaaggaccgcgatagcccctggattaattacttgtcctttttttagaacaacatcgcctgtcgttgtttcttcaccttttaaagatatattttcattttttgaaaatggtttacgaattgtaaatgtatcttctagttcaatcgtttgttcaaacataacaacagcatctgcgccattaggtatttgtgctccagtcataatacgcaccgcttcgtgatccccaactaatttatcagaaactgaacctgcaccaatatgatcaatcactttaaactcaatgcgattctgaccacttgccccttgtgaatcaacactgcgaattgcaaaaccatcataaggtgatttatcaaaccttggtatatcataagtagctacaatatcttctgctaagatatgatttagacttttttcaagtgctaccgtaattgccggcattgaactctgctgattaacgatacgttgaattgcttctttaactgggattgggtttcttttttctactaccattaaaaatcatctccaaaacttttattttttcatgatatactagatgcactaggaggggtaaaatgactgagtttactcatattaatcaacaaggccacgccaaaatggtcgatgtatcagacaaacaaattacaaaaagaactgctgtcgctcattcaagcattactgtaaataaaactatttttaagcagatttctaataacaccaataccaaaggcaatgtattgaacactgctcaaatcgctggtattatggctgccaaaaatacatcaacaattattccgatgtgccatccattaccattgactggcatagatgttcacttcagctgggatgaaacaaatgcacccctttatactttaaacattcaaacaactgtctctacaactggcaaaaccggtgttgaaatggaagctttaaccgctgcatcagcaacggctttaaccatttacgacatgacgaaagcagttgataaaggtatgattattggcgaaacctaccttgaaagcaagtctggcggtaaatctggagattttcaacgccaatcaaatcaataaattattttgtaagctcatgaatcagatgatttaattctggtttaatgagcttttctaatgctaatttaactgcgcctgttgatcctggaatcgaaaatatcaatttattattaactgtacctgctacagcacgagacaataatgcacgcgtgccaacatcttcaacataactcaaatatctaaacaattccccaaagccttctatctctttagttaaaagtggttttactgcttcaatcgtcacatcacgttgtgcaatacctgttccaccagtcgtaatgatgacatcaatatcttcttctaaccacttcttcacctgcgtcgtgatggctactttttcatctttcacaattgtataatgtgcgtcactcacttcaacgtcatctgcttgtaatagttggcgcacgcattgaccacctttatctgtatcaaagtctctagtatctgataccgttagtacggctgctttaactgtacgattcaatttaacgttttgatgttcgcccataatattacactccttttgtcttatctttttttatccaaacaataaattcattagatgtgtggcatctgatgtgcgtgtcatgccatgtattaaaaaccttccacctttaaaagcaacaatgcggtgtcctttaaattcaaacataaccatatacgaattactgcgataatttagttgatgttgttttaaaaattgaacaagaatgtcgtgtgtaattgatgcattttcatactgtacagtgtctctaccacacaatgttgcataacgttgttcattcttgtttaaatacggataacttggtacatctccacaagttgtacagtctgaacgttgcattttactgaaaccaaatgaataatgactaccttcccaaatatcgccataagttatttttgtgtcaattggttgttccgttaatactttcatcgcatctcttaattgtaaacttgttgccatcgtcacggcaggttgaatgacccctactgtatcacatgttaaatttaatgctggcaattgtggtaccaaacagttaaagcaaggtgttttaccaggtataaatgcagcttctgtatatgtactctgtacaacaccaccataaatccaaggtatacgatgtttatatgcaaaatcattaatcagttgtcgtgtttcaaagttatcggttgcatcaataataacgtcaacgtcctgtccatgtgtttccaaaaaataataatccacatgggcaatatgatcatcaatatcaacatcactacgtaaagctagcaaatgctttttagctgcaaccaccttaggcatcattttcaaagcatcttcttcagtaaacaatgtttgtctttgtaaattactaaattcaatataatctctatcaacaatgattagtttagcaatgcctgctctaacaagtccttcggccacatgtgtacctaatgcgcccataccaataatcaacgcacatttttgatttattttgctttgacctatttcacctatttgtttaaataaaatttgccttgaataacgttcttgactcacattaagttatcctttctttttatcattactttcattatatgacgcgcgtcaatgtctctcaaaaaaactgcccctaaaaaagagtttaaaacatcattaaaatgctgatagaagcattcacttctacaattttaaatacgttctaaactctttaatggcaaataaatgtttacccaattgtaataatttcatgagccatttgttctgcttcatagtttgaatgtgtcacaaatatgattggtatttgccattcgttgaaaatacgtttaactaatgtaatactctcatcttttgtagtatcatccaaactagaaaaaggttcatctaataaaattaaatctggtttcgtgctaagtgcacgtgcaagtgctacacgttgtgcctctccacctgacaatgtcataggatattgtttcatcaaatgatcaatgtttaaagtttgaattaattgatcgatgtgttcagatggttcagccataaaagtaatatttttatagaccgtcatattaggaaacaattggtagtcttgaaacagatatccaatacgtcgttgttgaattttaacattcacgttttttgccgtatcagtaagtaattgcccattcacttcgataatagcttcatctgctttacgtaatccggcaatcatatttaaaacagtagttttaccaatgccagatggaccacgaactgcataaatttttggttcagtatcatctatattgatgcgaattaaagtgttctttaattgatatttcacattgattttaagcatctagtcgacctccttatatttatctttattcaataaattaattgtagatataaccacaatagagaatgcgactagcactaatacccataaccacgcttcattttctctaccttgttccactaagaagtatatttctaaaggtagtgtattcgttttatttggaatatatcctgcaaccattaatgtagcaccaaactcacctaatgcacgagcaaaactcatcattatacctgctaaaatagagcgtttagctaatggtaaaattaatttgaggaaaattttcgtttcacttgctcccattgttctagctgtattaatcattttcgtgtctatacctctgaagccttgcacagtatgttgatacattagtggaaaactaacaatgacagatgctatcacagcacctgtcaaagtgaacactacaggtaaatgtagtacattcgcaaagaattgaccgattggtcctcttggcgagaagatgattaatagaataaaacctaataccgttggcggcaaaacaataggtaatatcaataaactttccaatactttaacccacgaacccttacgacgatacaaccatttagatataaaaatacctaaaaccgttacaataatcgtactgattacagcaactcgtattgatatccaaaaaggtgttaagtcaggcatggattacaactccttatgctgcaaagtggtattcttttagtatttctttagctttatctgattttaagaattccatccactcttttgctaatttactatctgatgtagcaccagcttcgtatgtgattggcttcttaagttctacttctttaattacttttacagtatcaatttttttattttgtttatataagtcagttttatacacaaaaccttgtttcgcattacccttttcaacataatttaatacttgttttacatctttagcataaacgattttactttcgacttctttaaataagttattgttatctaaatactgtttcgcatattttcctgctggtacagttttcacttcacctaatgctaatttatcattgtcttttaagtcttttactgaagtgtaatttgaatctttatcaccaattaatactagactatttttcgcatatttatatgtatcatgcgctttattcttgtcttttaatgcatctacatctttagtatttgcagacataaatacgtcaacaggtgcgcctgattcaatttgttttcttaatgcccctgatccaccatagttaaatttaatatcagcatttttatgctcttttttaaattctgaagctaatttcttggttacatctgttaaacttgctgccgctgcaacttgaatctcttgtttcttaccattgtctgcgtcatcttttttactttcattattatcgttagaattagagcaaccagctaatactaaaagcattgcaatcacaacagcaaataaacgtttcaatttcattgagtgaacccccatttttaataatatttacattttcattatacacttactattatatttgaaaagaaccgttgcctgtttatatattgattcaaacaattgtcaaatttgcataagattgatatttattaattgatgccctagtatgtatattctcgaattcaatttaaatcaaacagattgctcgctattaatttttatcaatcaaatttcaaacttaagcaaatatgttaaaattttaagcaaattgctttaaaataaagtttaagctaattaaaggggttagataatgaacaaagatgtatctttaggtcaaccaattgttagatatgaagatggaaaattattcaatacaacagatcaatatgtgacagaatttccacttacaattatggtgaatggtgaagaatttgcgactgttatatgcagtccaacaaaccttgaggagttagtcattggatttctggcttcggaaggtgccattttaaagcgagatgaattaaaatctgtactgattgatgatagtaaaggttttgcccatgttgaacttaataaagatttaggcgatcgctttcaatattccacaaaacgaatgattgcatcttgttgcggaaagagtcgtgagttttattttcaaaatgatgctgctatcgctaaaacatctatgtctaaaatcactttaactccaatgcaaattattaacatgatgactcgattacaaagtgcaagtcatatttaccaagaaacaggtggcttacataatgctgctataagcgatggtttgacattttttgtacatcgacaagacattggtagacataacgctctagataaattatatggattttgtatccagcgacatattactgtccgagataaagtattaatttttagtggacgtatttcatcagaaattttaattaaagccgcgaaaatcggtgttggcgtcattttatctaaatcagctccgacaacgcttgctgtaaccttagctaatgacctaaatattacggcagttggatttattcgaaatggtggctttaatatatacagtcatccagaacgtatcattgattctgaacaataacatattcattatagtgtgtcataatgaacgatattctacatgaatcaacaatttaaacgcactatttttataagtataagtagctcaaaacaatttaaaaagcagtaagttgatttctactcgaaaccagcttactgcttttttattctaatacaaacctatcatcaatcgttaattgccaatatcttcttttaatatttgataacaaaatgattggtaaacataaccttgctttgcatacatatcttttgctgtatcttcaccatctgcaactaatatgattggtttgtgattttttgatatggcgtattcacctatcaacgattgaattgtagatccaattccttggtgccgaaattgttctaatacaccaaatccatctaattcaatgtaattttcactttcaatgacatctacaacgccaataggttcattatttaaataagctactaagcgtttaatcacatctttttgataatgttcccttaccatttcttcatgtgcatctgcatagtcttttccaaatggcaaactaaactgatatgcaacttttaaataggcatctatatgcgactcgtcaacgatggcaatttcaacgtcagagttacgcggcaaattggcaagcgcatcactttctatggcatacaattccataatacctagttcaaaattcatatctttaaacatagccatccaatgattatcaagttgttcattttccgggaaactaaacgcataatgatttgaaccttgatttgtatgtaattgatgttgacgctctaagtctttcagccatcgctcttcggtaggcgtctttttatatatccatgtgttacttgtgtatcgttgtggaaaagaaggcgttaaataaatcaactgctcgtcgtcattttcaaatatagtgccgttacaatatatatctgacatacttatactagccattgacacctactcctttcacttttataaatttcaaagcaacttattcaattactttactatcttaaatatgattattttattcccataatttgacgaaactgcgagtgattaagtaaagctgtaccaatcaaacttgctacaattgcttttaatatatcaccaggcaaataagctaatgaaattgaaatagctttcgtaaatggtatgttaataatcatgcccataatcaatgtaccaataacatctaatgctataacaccaaaaactaaaataccaacgaataaaatccagaaattaatttcattgatgaatctatctcgaatcgcaccaatcatgaatgctacaactggatataatagtaaaaaccctgctgaaggacctgcgaatacaccgatgccaccgcgaccacctgataacaatggcaagccagcaactactaataataaaaagacgataacacttaatgtgccatatttacgtcctaaaatcacacctgctaagaaaataccaatgttttgaagtacaattggtactgaagaaaatggtagtggaattaccggtaccattcctaaaatagcgataatcgctgtcattaaagctgtatatactaactgttttgttgtcattttttacttcctttcgtatttcatgaccattattatagcaccattgtaaactttaagaaatgaaaagtttacaataagttgttctatataaattaaaaccttaattattctacacagctgttaatttacttttttagcaagtgcagttatataatcaaaaaatgcgttgttatctacatgatttatgacattaattttgcgcccatctttacactcaaatgtcttaccttgacttggtccataacttattacatcgacttttttctcaattgaatgaaccaagtccttgttaccaatataagcagtcgttaaaacatcccataaaaagtaagtagaatttgttataaagtgtgttaatggtggtaccgctgcataacttactcctaaaaaatcaatgcccgtatattggcgttcattcgcccatctttgtctaacatctaacgttagcggtacttgattcgtactttctaaagcaaccatatcaatctctatatcgctatcaaaaacaattttaaccgcttctggatcccaatatgcattccattctgcagaaccatcatgctcaggttcttcaacatttccttttggtaaaaaggtgccacccatccaaactaatttttctatatactgaacgatagatgaatctttttgtagtgcttttgctaaatctgtaagcgggcctgtaaataataatgttactttttctgattgtctctttaaagtttgaataatgtcttcaaaggcttctttgtcgctcacatttgaagcaacatgtttgactggctcatttaaaattggcaatgcgtccataaaaaaggcatgcatacgccattctttaggaaatggattttttcctcgttcatatgatggcgcaacttgaatatcttcatttgaaaaacgattaataatttttactgatgcgctcaaagatggctctaaataacaatcagcaccaattgtactgacccctatcaattgaacgttttccatttgtaataataaaaatagagatactaaatcatctacaccaccatcgtggttaaaataaactttcttagtcactcgaaatcccccttacatttcattttccattaacaatattatgtttttataaaacgttgttatatatctttctacaaaatcataacattctgttgtaatccttttaaacctcttcttttattgatagccattccctgatatcccttccataaagtatgcactaatataattatgatataacttatcaataaagagatacattgagctattttctcaggtatactactttagctataataatactaatctatcattaattaaattgaacgataacaacggcacttattatttaaaaaaatacaaatatctaactttctagctataaaaataagagcctaatacaatatcaaaagatgatatgtttcagactctcatttcactaacttatatagctgaattattttgcagctttaattaatttttcttttaaatctttacgcatgaaatctaatgtataaggatcgttgtaccagtatgtaccagcatcaactttaacaatatgtccttctttagtagctttcaaattcttccacatgtttgttgattcatatcctggtgtaggtttaccttcacttgtactcacaatgtaatcaccagcatatttttcaatttcttcttgtttcacttcagcccaacctgcttttgcagttaacttttgttgttctggttgcatttttaaaccaaatgcttgatataatacttctccaccacgaccccagttatcgccgtaagtgtataattttttatcaaattcatcaaacaatgacactgttgcatcttgtccaattgcttttttaatttctttaccgtctttagcagttgtttcttcccaatctttcttccaagcttttactttatcttctttaccaacaattttccctaacatttcttgttgttctaaatatttatgcttattatagtcaacaactactgttggtgctactttttgatattttttaatatctttgtcagtagagtatacaataattaaatctggcttttctttagcaactttttctacatcgccatcaccaatttttgtaacacctttaaatttatcttttaatactttgctttgatcgacttgttgatttacagctacaatgtttgcacctaattttttaagtccaccagcatatgttggcgcaactactgcaatgcgtttagggtctttcggaatatctaccgttttgccatcgtccattttataagatttagtttcagctttgttatttttttcaccttggttcccacacgcagctaacactaataacataattattaatggtaataatagttttttcataatttcctcctattgaaaatgattatcaattattccaaaattatacaagattgcatatacatttacaatagctagtgctatttatttttttattttcgcaaaaaatttaacaaaatatcttaacatccctataaatccccacaaaaaagggtaaatccgaacgtcaaatttcatctctttatgccaatcaacgatcgatttacctttttaaatttaaaatgtatctgtaatactcttagcaatatttgtatatgctgcatcttccataggtggattgtgtaatcctgcacgcatgtcacgatagtaacgttgtaatggtcgattcatttctaagcttttagcaccaactattctcatcgctaaatcaatcacttcaagcccttgattcattaccatcactttactcgcacttgttggatttcttatctgactgtcatctttatattgttgatacccttttgctgtactccataaaaattgtctcgcacataacaatagcgtttccattttccctaaattttgttgcacagttggcaatgttgcaatcgttccttcaatactattagggctatgttggattgcaaagtctacagcataatttctagcagcttgtgctatacctaaataacagcttggtatatgcaatatccaaccatttggcgctttacttttctctgtttccactaaatgttttaatggtacttttacatcatttaatattaaatcatgactttctgtcgctcgcatacctaatacgtcccaattatcggcaatttcaacaccaggcaaattcctgtctactaagaaaaaaccaacactttctaattcttctatataagcagcaacaataatatgtgttagtgctttactcattgatgtatatgtcttcacaccatttaaaatatacccatcatcagctttaacagcatgtgtacttggtcttccccctcttgttggactacccatttcagcttcactaactgctctattaactaatgcaccattattaatttcaacagcaaattgctccaacatatcttgagaccataatttctgttcataaatttgtcctacgacactcacatgccaaccaatagataatgctgtggcaccatcaagttcgcctaaaaatgattgcaaaataaccatgtcttctatggtcgcaccttcaccaccatatgcttttggtaacgttaattttccataaccttctttaattaaccattcaatatttttatatggaaattggctatgttgatcattatattcagctttagccttaaatgtatctctaattactttgaatttttcaatccattttctttgaatttccgttgttattaaaaaggaattatccatatcattcatattagtcaccccacacaacacacaatataaattatttattcctagtttaacactcgactttaaaaataaaaaggaacgtgctgtgaacaattaaaagaaaactgataattcgattaagtatgcacttaattttatccataaaaatacaccttaaactatacaattcgctgtatagtttaaggtgatattcaaacaatattaggtttgatttaactatcaagcatctactttgtcatgtttaataccagcaaataataaaatccatgtcacaataataaatggcaatgttaatgcaggtaagccaaacggttcaagcaatgttgttgtacctagttgcaccactactgttaataacacacctaaaaaagtcgaaatataagggttaatcgctgttttaaatgtatatcctagtgcgattgccattaatacaaagttataaccgaataatccctgattaatatcatcataattaccacctaatagagctacaatgataaagcttaacaaactagctataacagctaagagtgctgcttttcttgatgctatcaatatgccgattaaaatacatacgccaccaattacactcgcttcgataaatacttgactgaatccttcaaataatgactgaatgaaatgtattctatcattgttgctaaaattaaccgtttcaatgttttgaggcattaactttaacgatgtatctacaaatttaacctgtcctgaaagtaaaattgtaaaccaagtcacaatgacaaaaggcatcgtcagcatcggaactttatatggtcttaaaacttctctcactgcagcagcaactggtaacgttaataaagttgctatcattgttataacaatatctaatcctgacttatctaaaaagattgttaacgcaatggcagttaacactggattaaatccggctaacccatcattaatctctgcttcactataattaatgtaacgtgcaaatgcataagctatgatactacctacaatagccgctaatccaattgtccaatcggctacaaataatcctattaagataaataatcctgtccatttattactaattaacacaacctgagaaatatttttcaaaagtacatctattatcttcaaatctttcacctttcctttgaatcattactcattaatatactactattctatgaaaagttatattaaaaactattttggttttttacataaatatattccactatttgttttcgattagattgtttgcttcaatttcggatatgctaaaaatataattttctaattacacattgaactttgtatattacttgtttatcacaacaattaggattaatataaattttgtaaattgtatctaatatgaaattgggggttttaatttgcattttacacaacgagagcaagacaaattaatgattgtagtggcggcggaagttgcacgtcgtcgtaaagcacgtggtttgaaactaaatcatcctgaggcattagctttaatcagcgatgaattattagaaggtgcacgcgatggtaagaccgttgcagagttaatgagttatggtagacaaattctaaacaaagaagatgtcatggatggtgtcgaacacatgattacagatatcgaaatcgaggctacgttccccgatggtactaagttaatcacagtacatcaccctattgtttaaaggaggcagtcaaatgataccaggagaaattattacaaaaagtacagaggttgaaattaataaccatcatcctgaaacagttatcgaagttgaaaatacaggagatcgaccaattcaagtgggctcacattttcatttttatgaagcaaatgcagcattagatttcgaacgtgaaatggcatatggaaaacatttagatatcccagctggagcagctgtccgatttgaacctggggataaaaaagaagttcaattagttgaatatgctggcaaacgtaaaatttttggttttcgtggtatggtcaatggtcctatcgatgagtcacgtgtctatcgcccaactgatgaaaatgatgaatatgcaggtgtattcggagataacggtgctgaaaacgtgaataaaaaaggaggaaaaagatcatgagctttaaaatgacgcaaaatcaatatacgagcttatacggtccaactgttggagattccattcgtttaggtgatacgaatctatttgctcaaatagaaaaagactatgcggtttatggtgaagaagctacttttggtggtggtaaatctattagagacggtatggcgcaaaatcctcgtgtaacacgtgatgacgtgaacgttgcagaccttgtcatttctaatgccgttattatcgattacgataaagtggttaaagctgatataggcattaaaaatggttatattttcgccataggtaatgccggcaacccagatataatggataatgtcgacattattataggttcaacaacagatatcattgccgctgaaggtaaaatcgtcactgctggtggtattgatactcatgttcattttattaatcctgaacaagcagaggtcgcattagaaagtggcattacgactcatattggtggtggtactggtgcttcagaaggttctaaagcaacaactgtaactccaggtccatggcatattcatagaatgttagaagctgccgaaggtttaccgattaatgtcggttttacaggtaaaggacaagcaacaaatccaactgcactcattgaacaaatcaatgccggagcaattggattaaaagtacatgaagactggggtgcaacaccatctgctttgagtcatgcattagatgttgctgatgaatttgatgttcaaattgcattacatgcagatactttaaatgaagcaggatttatggaagacacaatggctgctgttaaagaccgtgtacttcatatgtaccatactgaaggtgctggtggcggtcatgcgcctgatttaattaaatcagctgcattttcaaatattttaccttcatctacaaatccaactttgccttatacacataatactgtagatgaacatttagatatggtaatgattactcaccatttaaatgcggctattcctgaagatatcgcattcgcagattcacgtattcgtaaagaaacgattgcagcagaagatgttctgcaagatatgggtgtattcagtatgattagttccgattcacaagcaatgggccgtgtaggtgaagtaattacacgaacatggcaagtagcacatcgcatgaaagaacaacgtggtcctttagatggtgattttgaacataatgataataatcgcatcaaacgttatatcgctaaatatacaattaacccagcaattacacatggtatttctgaatatgtaggatctatcgagccgggcaaactagctgacattgtcttatgggacccaattttctttggggttaaacctgaattagttgtaaagggcggattaattaactctgccgtaaatggcgatgcaaatggttctatacctacatctgaaccgatgaagtaccgtaaaatgtatggtcaatacggcggaaaccttacaagtacgtcaatgacattcgtgtctaaaactgcttatgaaaatggtatcaatcgtgcattaaatttaaaacgcatggtgcgtccagttaaaaatattagacaattatctaaagcagatatgaaaaacaacagtgcaacacctaaattagacgttgatccacaaacatatgaagtatatgtagatggagaaaaaattacaagtaatgcagcaactaagttaccattaactcaaagatacttcttattctaggaggaacatagaatgattgttgaagaaatccaaggcaatattgccaatttgtcaaattcagaaaaacaaaagcacgtcgaaaaagtataccttgaaaattcagatcttgttaaacgtattcaaagagtcgttacagaccatggcactgaaataggcattcgtttaaaacaacctattgacttacaatatggagatattttatacgcagatgaccataatatgattattgtggatgttaattcagaagatcttttagtgattcaaccaagaacattgcaagaaatgggagatatagcccatcaattaggaaatcgtcatttgccagcacaatttacagagactgaaatgctagtacaatatgattatttagttgaagatttattaaaaagtttaggcatcccatatgttcgagaagaccgtaaagttaataaggctttcagacatatagggcattctcatgattgatcatacacacttaagattatttcagttctgtgattcacagtttccaacaggtgctttcagtcattcatttggtcttgaaacatatattcaacgaaatataattcatgacgatcatacttttattgcttggttaaaaatgtttttacaagagcaacttacctattctgatggtttagccatgcgtttagtttatgatgcattggaaaatgatgatacacaaaaagtattacacatagataaactgatgtttgttcaaaacttacctaaagaaacacgtgttggtgcaaaacaaatggggactcgcatggttaaattggctttagaactttataatagcccatggattgcttggtatcatcaacaaatgcaagataagaaagcaaagttaaatccagctatttgttttactatgctaggccatcatttaggtgtagatattgaaacgattattgattactatttatatcaaaatgtttcaagtttaactcaaaatgctgttcgtgctattccacttggacaaactgctggtcaaaagatagttactcacatgattccttatatagaagaaacaagaaagcagattttcgaattaaaagaagcagattttggcatgacagcgcctggtttagaactaaatcaaatggcgcatgagaacgtcaatgttagaattttcatatcataggaggttataattgtggcaaatccgattaaaattggtattggtggtcctgtaggtgcaggtaaaacacaattaattgaaaaagttgtaaaacgtctttcaaaagaaatgagtatcggcgttattacaaatgatatatatacaaaagaagacgaaaagatattagtaaattcaggagttctacctgaaagtcgtatcattggtgttgaaactggtggatgtcctcatactgcgattcgtgaagatgcatctatgaactttgcagcaatagacgaattattagaacgtcatgacgatatagaactaattttcatagaatctggtggcgataacttagcagcaacatttagcccagaacttgttgacttttcaatatatattatcgatgttgctcaaggtgaaaagattccacgtaaaggtggtcaaggtatgattaagtcagatttctttgtaattaacaaaactgatttagctccctatgtaggtgcatcattagaacaaatggctgaagatactaaagtatttcgtggtaaacgtccatttacttttactaacttaaaaaccgacgaaggtttggatgaagttatcgattggattgaacgcgacactttactcaaaggattatcataatggatgaacaacaatggactgggcaacttgatttaacagtgtttttcgatggcaatcgatcagtatcaagagatattttctttgaaaaagcacttaaagtgatacgtccagtttatctaaatcaatctaccattcctacattttatatagtaaatgtaggtggtggttatttagatggagatcgttaccgtatgaatgtgaatgtcgaagataacgctaaagtgacattgacatctcaaggtgcaacaaaaatatacaagacaccttccaatcatgttgagcagtatcaaacttttaatttgaaagataacgcatatttagaatatgtcgctgatccaatcatcgcatatgaaaatgctaaattttatcaacacaatacgttcaatctcaataattctagttcattattttatactgatattttaactcctggttattcaaaaactggcgaagccttcaagtatcaatatatgcatttaataaatgaaatttatattgaagatgagttagtcacatatgataatttattattgaatcctaataaacaatcgatcaatgaaataggttatatggaacattactctcattatggctctgcttacttcatacatgaagatgttaaccaaaaactaatcgattcagtttatgaaaccattagttcttatagcaatacattcgattgtcgtgttgctatttctcaattgcctacacatggttttgcagttagaatttttgcttatcgcacacaaattatagagaaaatacttggaaccatccaaagctatatcgcagaaaatatttatgatcgtaaacttgattttctaagaaaatattaaaataaaaagactagtgtaccttgtttcaagcttaataagctgaaataaggtatggctagtctttaactttaattaaagcatcttcaatatttaaattttaagttaattttatgtcccaatgctgaataaataacttcgttttaataaattgttatcgttcaatgttattaaacgcaattaaccttgatttaatttttaatgtattcttctaattctgaaatcagtttttgaatatttgctttttgtgtatctgtaacataaacaataactgttctttcgtcttgtaaacttcttttctttgataacaattttaaatcttttagcttttgtaaagctttagttaaatagtaaggtttgaactctgagcacttagcaatctctttagatgagatttcgttagactcacttcttaaaatatgatttaaaatataaatttcttcatagttcaaattgaacttcttttttgtatctctgaaaaacttcttaacttgaaatgttgcgttgactaaatcattaatgtcattaattttactcattattaaaccactcctctgatgcacatcttgttgtagcaaggttcacatgtaatttattaaatcgaaactctatccaactatgttataaagttcattctaaacaaataagtataaaaattcaatatttttattactagaatatggttaaatacatttatttcttataataatttgatgtttaagatattttgccaaattgaaaattattagtctgaatattttgtatcttaactgatatgtaaacttttaaaattttaatctatatcaacgtgtttgatttgatattttttatattaattggatggcttgctcacaaaatttataaaatataaaaaaagaagagctttaaatcataacgcatgccatttatctttaaatgcaatgagttatcattcaaactcttcttatcaacctacatacattgacattatactatcatatgttgttttacatattcaacaaacatttcatcgttatcacttttaatatcatgcattgggacattaccaatattaaatttgaacattatagtttgaccatcataatctatcttctctatttcattataactaatacttctataataaaattggccattcatatctacattcataattaatctttcatttgttgctataaatgccccttcaaattcattctcaccttgaacttgatactcaattattcctagcactgacggaccctttttttcagttggaaataaatcatttggattcacattatctaaaatcataatatccctcccacttaaaactataaactattcttcataggtatatgaaatacaagtgattaactatttattattaagcttaacttgtattcccttttcaagataattataacatgcttgaataagcatagtgactttagaaaacttttctcgcttgattgttacaataacacgcctttcatctaattcacatctctcttttttaactaatcccttcaaaattaaacactttaaaatcgggctaaccgcaaatatcgggtgatggaattcaccctgtaattctttaaccgtcaattgacctttatgcagatttaatattcctaaaacgtataactcttctaatgataattgacacatatttaaataacactttagattccgcaataattcttgtgacgacaataaatacgatacatagtcacaactaaaatcaaatgtatattgaccaaaataacgttcaatatagtcactaagctcattattcatatattctattttatctatatgcattttattaatcgaaatagtcaatttacgttgatccctttgatctcttcctttcaatagccattgatgattgtttaaataacttaacatttgaagaagggccatcttagattggatttctttcatttttaataaactatctattgaagcgctattggaatcagaattatcatatttaactaatagatttaatagtttcacttgagtcaaagtgagatgaaatgaatatttcaacatatcattaatgactttcaacattagtatgtgtgcagttaaacgcttaactttaaatttagacatctttaaaacctctcttaaaccatgcctatatctcaagatgatatttcaaatgaacaatactattgcttgagaccattaatgaatgatcataaatatttctttctataaaattagctttccaataactgtgttgttgcataatatcattcacaagtacaccattttcggaagtatgattatctttatctatacttaaaacaatttgtttagttttagcatggctaaattgttgaagacccttacacgataaacgtatagcgtccgaattctcatttaacaatgcggctggcaaacaaatgacacattgtacttcatgtttgaacttcgttacaatcatcgtgtcattttgataaataacaatccctcgtaattgattaagtatatttatgataaaaatgaatattgataatctagttaaatttatttctttgctcgcttcacttataattgacatgtgcataataagtcctcgaaattttgtataatttgtcaaaagttcagtaaccttattaatatcagacattgtgattttttcttttaagtcattattctcattaatcaaatctacatcacatataattttagaacgtgcaatagacacctgttctatttgtcttagcggtaagataaaatagtctattagatgatcaatttctttatcatagcgcgtattcaactcttttggttccagatgatatattaattcaaatactcctatataattatctattaaacgtttcagtttttgaattgcagtagtatttaagtcgttaattaaaaatgcaatcttacatctattactctcaaatgtcatattaaaaattgtggctactagcttttctatcttgcctctttcagtactcgttaacaattccttatattcatgtttaatacgaaatactacatttacattgtaattcactatcttttgaagtaataaagtgatttgttcaatcgatagctcattgcttgtgtcgattgtaacaattatatgcaagttttcaggattaacacctaatctttgaatgatttgtttaatagtataataatccatccaataaaaattacttcctttaatataaatgtttttaggttgatacatttgactcctttttgtaggctcaaaaggtatatcaatctcgcgcatacttgaagaactttgattagtatcatcaaataattcaattatatttttatcaatttcaactaattgggaatggttaattgaatgagatgttggactatatctttttctaattaatttaggagtgttaccatacgtttctttaaagaggtgtataaaacgagaataatgattaaaaccatgactacttgcgatttcttcaataggcttcttagaagttaaaatatcaattaagcaatgctccagtctaatatgatttaaatattgaataaaattactataaggtgtcgctttaaacatgtcacttaaagctttgtttgtaatactaacttgattaataacatctttcctatttatctttttatggtggttgtttgttaaataatcgtgcacttcttcggctactaaatgacgactaccatcgtatgtatttaatgacattaattcaacacacatgtaattaataatcttatcattagcattataagactgttgtttaattttgctgtagattaaatacttaatcaagattctaaaagtgctagcaacctcatttgttaatatcttgccacgcatcatatagtttgcattcataaacttcaaaaatgtctttgcacttacttcaacaacacaacatacactatcatcatgaccatcaatttgatacaaatcattcaacataataatggtgacatcatttctttttacatcatattgttgtagattgattgaaactacacctgtaccttgtagccaatatataatttttaagtttgcttccttcacactactcattttcatacttttaaaaatatgtagtgaataattatctgtcatcttacatcctcacatatacaaatatattgatttactcctgtttatctttctcaaatcaattgtcaacatctaatattcactaccaattatatcgccacatgttttttagcagtaacaaaacataaatcgattatatcaaataatacttttattaaaacatttttttatgctaaattaggatattttatccattaaatatacattttcatccaaataccaaagctttcataatcatagaaacttgatcgttcgtgtcgaatttttatgcattttctgattaaaagtcctatattatgcacaaaatatacatttagaattttcagtaatattacaaatttgtaacagacttattttcgaaacattcagttttcacaaagaatgccgtagttataagttttgcaaaatgcaaatttctatacttttaaaattctattgtgtcaagatattagcaaaaaattacaaaacgttaacaaagcacacaaggacgctaatttctgttatagtctttcttgtcgtttaattacgagagataacttataacattaattttgtcacacggacattacgaaaatattttagatttaaaatttttaggaggatatttttaaaatgaagaaaatcgctacagctactatcgcaactgcaggattcgctacaatcgcaattgcatcaggaaatcaagctcatgcttctgagcaagataactacggttataatccaaatgacccaacatcatatagctatacttacactattgatgcacaaggtaactaccattacacatggaaaggtaactggcatccaagtcaattaaaccaagataatggctactacagctattactactacaatggttacaataactataactataacaattacaacaacggttatagctacaataactacagccgttacaacaactactcaaataataatcaatcatataactacaataactataatagttacaacacaaacagctaccgtactggtggtttaggtgcaagctacagcacttcaagcaacaatgttcaagtaactacaactatggctccatcatcaaatggccgttcaatctcaagtggttacacttctggtcgtaacttatacacttctggtcaatgtacatactacgtatttgatcgtgtaggtggtaaaatcggttcaacttggggcaatgcaagtaactgggctaacgcagctgcaagagctggttacacagtgaacaatacaccaaaagctggtgcaattatgcaaacaactcaaggtgcatacggtcacgttgcatacgttgaaagtgttaacagcaatggttcagtaagagtttcagaaatgaactatggttatggcccaggtgttgtaacttcacgtacaatctcagctagccaagctgctggttataacttcattcactaattagtgatggctatgtttacgccaacaaggtttcaagagccttgttggcttttttaatttctatgaaaaaaatcgaattggtaaaaacctcaaaatttcgattttcaccaatccgattcactctgtaataaagaataaacaacatacagccattgacacacccaaatttaggcatgtcaaatcggctatacattgataaatttttagttaaagtacttacaaatatacttgccttcaaattctcaattaatttagtcattacaaatcatgacataaaacttacattacatatatcaacatgttccgctacaaaacatattcagtatatgtatagaggatatttattctaagttaaaaccttttcaaattataaccgctacaattataaatgattaaagtgtttcaacatattatatatattccacgctcacattaagttaaacgtgaattcgatgactttttaatacctatccctgtaaaaccatagataattgctataattgcgcataaataacatggtactgtccatatgaaaaattcttcaacagagacatgaagttgattcgtatagtaaatacctgatgttccccatggtattaaaggtaagaccatcgtacttgagtcttcaagcgttcttgataaaacggaacgagagacttggtatttttcgaacaaatctttcattaacacaccgaccataataattacaatcgaagcaacacctgcagcgaatacaagcgcaatacaacaaataacagtaatacatattaaacttcctacagaatggatgcctttagaaatagtagttaataagacttctaaacatcctgctttttctacaatacctgcaaatgcatatccgcaaaatatcgttactaatatttgggtcatactcatcataccaccctgttctaacaagcttttcacactggatgaaatatgagactgatgtatcattgagtcgttaaaaccactaaatgttgctttgaaaccatctgtcattttgaaatgatgattaaaagtccccactataatggcagaaaagcttgatattagcatagctggcactgtagccattttaaatagcaaacaaacaatgatcacaattaagggaacccagacccatatgttaatttgataaatctgtgcaagctctgataacaaagtttgaatctgtttatcatttgaatgccctttaaattgaaatccagcaataaaccatactaataaacctatgattgatgcaggtatcgtcgtccacatcatcgaatgtatatgtttaaatatattaactttagtaacaagcgccgctaaattagttgtatctgataatggtgacattttatcgccaaacacagcccctgctataatagcacccgctgccatccctggaggaatccccaattgattaccaatagaaataagtgcaatccctgcagttgatgcagagccccatgctgtaccagttgctacagatgtaacagcacttataaaaaaggctgatattaaaaaatagcttggattcaataaatctaagccataataaatcaaggctggcactgtgccagaaaacatccaactgcctactataattcctaccgctagtataattaaaattgcaggcattgcagtatttaaacgttctgcaatgcctttttctaaatcttgccatgttaagcctacacgttttgcaatccatgtggcatatgctgaggcaataattaataatacttgaattggaatatcaaaaaacacaaagcctgttacaacaacaataaccattacaatcattgtcgaaattgattctaaaaaggttggttttcttttcatcatctatcgtccccttcgcttattgatgagaaacctcttttcttcaatttattgcttttgcataatgctatatccttttctatcttcaagccatcatttattttaaatatttttctaaatcaagcttatctaaaccaatttcttcaactgttaagccttcctcaaagaagtctctctctaaaatggttgatgcaattacaattactgcatctatatttggtgtcggtacatcaataacacgacctaagcttgaccatagtactaaaccatatgcaatatcttcagttaaatatctgctttctacatgatttggtcctggaatttgtgaaaatactgggcttgtattaaacaaacgatttaatggttcatcttctttatcacgttctaaataaccacgttcaatacgtgattctttagctgttgataattcaaaacctaatctacggcctaaattcaaacgttctaattcgattgcatgaagtaatctaactgtatgtttagtaattccttctttatataaagcgaactcgccagcataatcaatgcgaccgacattcaataatgttggtcctggatgcacttcaggattaccattttcaagatttgttttaattaagctttcctcttttactaaatgatcataaatacttgaaactttgtcataacaatcatttagacagcttctatcatatgttgaaaagaagatacgacgtacatttagagataaatcaactgctgcattttcaaaatcgacacgcgtaccatacgtcaacgtattagcttccgctagttgtggttttgtttcaatatgtctatcttctaaaacattcataaaacgaattgaccccattgctgcagccatgttgaagaatatcaactgattatcagttacatgctctgccattacatcagcataatactctatgtatgaagatggaataatcacttgaacaatttcagcatcttttaaaacatattccatatcatcactaatatcagtgaattttacgaaacgttcatcaccttcattattaaaatcaaatccgcccttttcgattgcgttttgaaacttacttatagattgattacgacaatataatttaacatcgtggcctttgctcaccatatctactgctgccgtaactgcgccatttcctgatcctacaattgctattttcataaacaaccctctttctatctttggttaaaattaaaaacaaattatacgtaagacaatataaaaatgatgcgaattcattacgcatcattataaatgttaagtatatataaccttaaattaacctatttaaacgccgacgtccaccaattatttttatttttaataattgtttaataaacatgtttatttttgattatattttgttatagttaaagataatattacaattttcaaaggagtgtctaatatgacaactgaaatgaacgacgtaacaaatcatcaaccgaatcgcaaatccaatgatgagaacattatggcgatgcttatctatttattaagtttattcacatctattattggtccactgattatatggttattgaaaaaagatgaatcgaaactagttgatcgtgctggaaaaaattatcttaactatacgatttcttatattatttggtctatcgttttagtcgttatcactttaataggcgttttcctaattgctaccgatattagtttcattatcattataggtttcatcattacatttatcggtattttatccatattcgctttctcaatattatcttttgtattcacaattattgcgtgtgtcaaatattataatggccaagaatatgtaatacctttaacaattcgatttatttaaacatattacaaataaatatttcctattaattatctgttaatctcattgtaactttgactaatttttattacaaaattagtcaaagtttttttattcttttacaaatcaataacattccccacaagaagcattaattttgttaaagtaactattgtcatcaattcgagatgtgagaataaaacagtcgctacgttttatttataaaaaaagatatagaactttggaggactttattcatgaaaaaattagtaacagcaactacgttaacagcaggaatcggcacagcattagtaggtcaagcacatcatgcagatgctgctgaaaattatacaaattacaacaactataactacaacacgactcaaactacaacgactacaacaactacgacaactacatcatcaatttcacattctggtaacttatacactgcaggacaatgtacttggtatgtatatgataaagttggcggagaaatcggttctacttggggaaatgctaataattgggctgctgctgcacaaggtgctggattcacagtaaatcatacaccttctaaaggcgctatcctacaatcttctgaagggccatttggtcacgttgcatatgtagaaagtgtaaacagtgatggttcagttacaatttcagaaatgaattatagtggcggacctttctcagtaagttctagaactatttctgcaagtgaagcaggtaactacaactacatccatatttaatataaacacgatgatacatattgtcttgaaacttaattctagtacatatgtcatcaaaaaactttgagctttcctttataggagaagctctttttttgctatttttcgttgccacctacttatttatatttcctcccatattcataatattaattttttctaatactattaactttaaaactacgttatctaatttaattgatccagtttttccacattacaatattcatagttctacagtgcctaagttatatcacctccatcaaaagtacgcgcttacatcattgatacacaagacatcatgacatagttgtatactgtctaatcttctactatactaagataaaaggagtgatcttttatggaaaaagtttatgttgctggtgcaataccagaagtaggtttaaaacttttacaagaacattttgaagttgaaatgtatgaaggtaaaggattagtcgataaagacactttaattaaaggtgttaaaaacgcgactgccttaattagtttattatctacaaacgttgataaagatgttatcgatgctggtaaagacttaaaaatcattgccaactatggcgctggttttaataatattgatatcgagtatgcccgagaaaaaagtatagatgttacaaacacacctaaagcatcaacaaacgcgactgctgatttaacaattggattagtacttgcagtagcgcgtcgtattgttgaaggggaccaattatcacgtacaactggatttgatggatgggcacctttatttttcagaggtagagaagtatctgggaaaacaatcggcattatcggtttaggtgaaattggtagtgcagtagctcgtcgtgcaagagcatttgacatggatgtgctatacactggacctaatcgcaaagaagaaaaagaacgagaaatcggtgcaaaatatgtagatttagatacactattaaagaatgcagattttatcactatcaacgctgcttataatcctaaaatgcatcatttaattgatacagaacaatttaaaatgatgaaatctacggcgtatttaatcaatgcctctcgtggtccaatcgtgcacgaacaagcactagtgcaagcattgaaagataatgaaattgaaggtgctgcacttgatgtatatgaatttgaaccagatattaccgatgacttaaaatcacttaataatgtagtattaacaccgcatattggtaatgctacatttgaagcacgtgacatgatgtctaaaattgttgctaatgctgcaattagtgccgttcaaggtgagaaaccacaatttgtcgttaactaataattgaatttattataataacattataaaaacaagaacccccatatgttgagctctcgtttcaacatacgggggttttcatattgttgtattatttttctttcgatttatataagaatttagtttgtccagctgctaatgcatttggcatcattttcataatacgatttctaactgcaacaaataaacgactacgatattgggcaattttaccgatttttctagaacgcttaattacttttgcagtatgtttgacacgtattttatcataacgctgtaatgctttttcaaagtcgtatgcgttaaaacaatttactaatacgatagcatcttccattgcttgtccagcaccttgccccatattaggcgttgtcgcatgtgctgcatctcctagtaaaatagtacgaccataaacaaaagatttgagtggtttcaaatcataaatattatgcaataagatacctgtttcactttgtttgtctaagatctctctaacttcatttggatagtgattaaagtatgcttgcaaatgaggtttaccaaacgaactatatttatgattgttttccttcgagttaattgtaatgaaccaatatgcttgattatttaataacggaacaatacctactcttccttttcttccccagtattcttttgcacaatccggatgctttaaatcaatatcatcaattaaacctctaaagcatgtatacccttgatataatactttactgtcagcatttacagattgtctcactttagaatgaattccatcagcaccaatacataaatcaaatgcttcactttcttgttccgcgaaatgtatggtaactttatctgtctcattatctatatgcgtgacttcatgatttgtaaatattgcgtcatcttttacataagatttaataatgtcaattaatgtttggcgtggtaacgtcacattcaatgtattactttttaatttaacagtagttaacaggcgatctttgtcatctaacactgtcattgtagataagatttgcccagcatttttaatacctttagctaagtcatgattacctagttttttaagcacattatctccgataccaatcccagcgccaatttctttaactgactcatttttttcaaagactttaatagtatgaccttgttcttgtaataatgcagcagctgttaatccaccgatgcctgcacctataattgctatcttcatattgtcacctctatatttttcattcttttctattttatcacatgcactattgtttaaaaatgactcttggaactaacgtttcatttttaaggacttaagtgtattatctgcaccattgtatattacatgcacatttagacagcaatattcatttacatcatgtacatttgtaacaatgatgtgggatatagcatatttgatgctatatagcgttttttgttaggttaaaatccatttaactaacacactcagaatgcgctaaaggagctcgaaacaataaattgttccagctcctttaagcaccgatgtcttatttataatatgtttgtctaatatcatctttctttataccaaactgcttataggatttatccattaatttggcaattttatctgcccagcgaatgtcactcgcatattgatgttgcgcaggattttctggattccatcgcatttgatataaattcagttgattgttttcaaaatattcattacgaatgaactttgcaccaccaataatcgccttatctggtgatgtccattgttccttttcagcataacttttcccactatgaacagcactactatcgaatgctcctataccaaaaaagttgtaatagcgtttttttccatctttaatgccttttgctaattctgatttgccgttacctgtttctactaatgcatggctaacaagataaatgacattaacctcatatttttcttgagcttctagaaaaactttccctcgattttctaaaatccccttaccttttagcaattggttaacttcagattccgacattggcactttttctgtgatatccatatacttcatatcattgtctttatgtgaaatggtcattgctttagcaatttcattattatttgcttcaacaaatttaccatcctcttcttttgtctgtacaatacctttcccttgttgcattgaaacagcctcatcaaaagagtaattcacatcatttttaaacaatttagtttcattcacgatgagtaatacagcaaaaacaactaaaataactatcaatagtagcgttgaaatgcgtaacttgaaattcttcttcatatagacaaaacctcatttttcttacttagacaataaaaaatatgccactacaatcgctaatattacgattaaaaaagaagcgttaacgattactttcatcgttgttctatctctgaacatcatattaaagacaactagactaattgataatgaaacagcaaaaaaagtaatagctaacactaatttcatcataaatagacagactaaacctatgactaataatgtattagaaattacagctgacgtttttaacattctcgaattaatatgcactcaccctttttatttaaataacttacataatcataataatacatgatgtttcataggcctgtcgatgattgattcacaatagcacgtgatttttttgtttttcaatattattcatttattccatcaaaaacaccctttttaatttttacaaaaattaaaaaaagtgctcctacactgcttgcatgtagaaacactttttcattgtaatgttattcttctcgagacataccttttagcatattaagcatgtatgttaaactacggttcatgtcgtcatctttcaatacgcccaatagacttcttatagttgtcttagcatttggactcgcttgattggcaacgtgtaatcctttattaactttatttaggaagtcgcttaaatctgatacattgagttcacctaataaaaataccattgaagccatattagataatagccctgtataaatatctttattaagttcaactgcaaatttatttatgatgacttgacgtcctcgaattgcaccatttaaagcatctaatagttttgcatcatctaatgttttaataagcttgattgcttttaatatactatctttattcgctgcaattgcctctgtaacttcatttaaactttctaacttaatttgttcttctgatttttctaagcgtctaattttagaagatattctctcagccattatttatccacctgatttcctgggaaaacataatctggacgttcccattttttctgtacttgaacactgtactgcggatgacgttttttattgacacggaaattattagggttcaacggtgacttacctcgtttcgtaattacctccaaacgacagctagtacgtttataagatggtgtatccgtgtattgatcaacatcactattagttaataagttaattgcacctagatctccattttccatcgcatcattatttaatggaatatagatttctttacctttaacacgatctgtcacgtgaacttgtaataccgcttctcctgtttcagaaatcagcttaacttctgcaccttcatgaatgcctctgtcttcagcaagctctggagaaatttcaacaaatgcacgtggcactttgtatttaatcattggtgtttgataagtcatattaccttcatggaagtgctctaacaatcgaccattgtttacatgaatatcataaatttcatcttgcttaaagtaattatcaaatgataatgggaataattttgctttaccattatcaaaattgaatccttctaagtatagaataggctcatcagtaccatcaggttgtactggccattgtaaactattgaatccttctaaacgatcataacttaccccagcatatagaggtgttaagcgtgctacttcatccataatttcactaggatgcttgtaattccaatcaaatcctaatctattagcaattgcttggaaaattttccagtcaggttttgaatcaccaagaggttctaatgcttggtataaacgttgaatacgacgttcagtatttgtaaaagtaccgtctttttcaagtgaaggacttgctggcaatacaacatctgcgtatgttgctgtgaatgttaaaaattcatcttggactaccatgaaatctaatttttcaaacgcagcttgtacaaaattaatatttgaatccacaatacccgtatcttcaccatataagtacaatgagtgtacttctccgtcatgtataccttctaccatttcatgattatctttaccagcttttggattcaatttaacgccatattctttttcaaatttagcgcgaatatcatccgcttcaatactttgataaccagtaatcttatcaggcatacttcccatatcactacatccttgaacattattatgtccacgtaatggatacgcaccagtaccaggacgacgataattacctgttactaataataagtttgaaatcgctgtacttgagtcactaccaatgtcttgttgtgtaatacccattgcccaacaaattacaacagattcagctttagcacattcttcagcaaatttaatcaattctgattcaggaatacctgttgcttcttcagcaaaagccattgtaaatgtttctaatgatttgtaatattcatcaaaatcatctacccactcatcgataaatgctttatcgtgtaaatcatgatcaataatatacttagtcactgcgcttaaccacgctaaatccgtacctggtttcggttgataaaaacgatccgcacgttcagccatttcatgttttctaatatcaaacacatgtattttttgtccaaataatttttgagcacgtttcatgcgtgatgcaataactgggtgtgcttcggctgtattggtacctatcaatacagacattgccgctttttctagatcttcaatactacctgagtcaccgccgtgtccaaccgttctaaataagccttttgttgcaggtgcttggcaatatcttgaacagttatcaacgttatttgtgccaataacttgtcttgctaatttttgcattaaatacgattcttcattcgtcgctttagaagaagaaatgaatgatagtgcatctgggccatgcttttctttaatagctgtaaaattatctgcaatgacgtttaaagcttcatcccattctacttcatggaactcaccatttttccttactagtggtttagttaagcgttgatctgaattaatatgtccccatgaaaacttacctttaacacaagtcgcaattttatttgctggagaatcatgtgatggttgtacttttaaaatttctctatctttagtccaaacttcaaatgaacaacccacaccacaataagtacacactgttttagttttcttaatacgctctttacgcatttctgcttctgaatctgagattgcaaatagtggaccataaccaggttctgcttttttagttaaatcaatcattgctgctaatgaaccaggttccgtatcagtcatataacccgcattaccttccatattcacttccatcatggcattacatggacataccgtcgcacattgaccacaagatacacatgaagactcattaatcggtacatcattatcccaaataacacgtggatgttcacgatcccaatcaattctaatagtttcattcacttcgatatcttgacatgcttctacacaacgcccacataagatacattgatttggatcataacgataaaatggaccataatccttttcatatggcttctctttatattcatacgtttgatgctgaagaccccatgcatccatcgtattatgaatttcacaatcaccattattataatcacatactgtacaatacagcatatgcttttctaaaattcgatcaagcgcttctttttgagcatctttcacatcattgttcacagtatttacagtcattggacgatcaatcaccgtactacatgaacgttcaattttaccgtcaatttcaacagtacatgtatcacatgtttgaattggtcccatcgactcgttataacaaattgaaggtacaaaagtatcttgtgatttaataaattcaagtaaattcgtacctggttctacaagataatcttttccatcaagtgtaaccaccaaatgttcttgcatattactcaccccgtctatatatattttccgtaaatgacttttaataaattgctcatatccacctaaaataacgatgccccacacatctttcagatagaattaatttaattgtattactttatgtactagttgttaagtgaaattttgtattttgcctttttacaatcatttttatttgaaatattttgcgcgaaattaaatcatctttttgtttaattgaaaataattatcattattagttttccaattatctgtttcacgctttttgccatatctttcacaaccttattaatgacaatacttaataatcacctcacctaaaaatcgttatactatttataaataccctttttctgaaaattaataacccaagtttgataaatatctactatcatttagaaggtaatatttatctttaaattaaatttgtaatggattaatttataaaaatcaaatcaggcattaaataaaatagcccataaatacaaagtgttatcaccttctatttacgggctattagttctattcgttattctatttacagatcattctatctaattaatttgtgtacaattttgataacttattttcccttagtttactactctagattatcttttaataacttagtactttcagcttttgactgctcactaggaatgaagtagtacaatccgtcactttgaatgccgccttgaccactcaattgatgtttattaatcgtgtcattagcatctttataattgcttctaatcgtattcaaatcacctaatgttaaatctgttttaacattattttgaatttcattcattagactattaaaatgtgtaatcgatgatgggcttgcaatcttattggccatcgcttcaagcacaatttgctgacgttgttgtcgaccaaagtcaccaccagcaccttcttctttacgacttctaataaacttcaatgcttgatcaccatttacatgtgtctgctgtccttttgtaaaacgaacaccatcaacagtgaatgtatcattacttactacatcaacaccgccgatgctatctatcatattatgcaaaccatccatatcgattgtcgcataatgatcaattggcacattcattaatttttcaagtgatttaacagccatatttggtccaccatatgcataggcatgtgcaattttttcagtagtaccacggccaacaatttccgctcttgtatcacgcggtatacttactatttcagttttcttcgttttagggttgatagataaaatcataatactatcactacgctctccgccaccctttttcttacgatcagcatctgaatcgacaccaaataaagcgattgtgaatggatcaccatcgtttaaactcacttttttatctcttaattctgaatgattgcgatctaacggattgtgtatcttattaccagtaataaaaattttagcagctacatacacaacagctacaatcgctaagattactaaaataccgaatacccataaaaatatttttttcggtaggctcattttacttttagacgaacgtttcaatcccaccactcctttactattccttacatactttgtctgttttctctatttattatatagtaaaataatttttttactatacttctgtagacgtataactattttttatcattttttatctctagagaatatctatctgtatttttgataaccaccatttgcatttaaaattttaagtaccgtttcatgacatgctttattacttataataaaaggtgcaccctttaaatgatcaattgccttaccatctaaagtcgtcatttttagattcaatagttctgcaaataaaaactgtgcagcaatgtcccaaggtttaggatttgtattaatatgtgccccaaattgaccttttgccactcgcatagaatctaatccgcaagcaccaactaaacgataactaaatgaggcgtcaaataaatcttgcaccgtatctagattcatcacttgtgcattaaacgatataatagcgtcttccaattttaacgatggtggttcttccatcttaattccattacaaaaagcaccttctcctcgtattgctttataaagctttttatgcggataatcatatacgtacgataacattggtttaccttcataaaaatacgccaatataatacaataatcttcttgctgttttactaaattggcagttccatcaatgggatccataatccataaatgattaatttcattcgtaatcattgcattacttttttcttccgctaatagttggtgttccggaaaatatgttgctaaaaattgttgaaattgttgttgaatctgtttatctacatttgtaactaaatcaaatcgatgacgcttagtttctgtagtcatttccataattaattgcggaataacattgtctatttgtttcaaccacgaacatattaacttatctatttgctgtaatgttttatctgtcatttcgtccaccacttctcatatcattatcattttattattaccctatattaaaagaatcaacaatacaactgaagacttcttcattttatgcataaaaaaatcggctagtcacgtgctagccgacaaatagaaaggaaagtaagtaataaatattgaagatgttgtgatgtaacttgaacgattaaaagctatctgttatatagctctacccctttgtttaatcgctccccctgttacaagtaatatcatagcacaatcttttttaaaatgtaagcgttttccacaaaatttttccgatttttttaaaaagatattgaaaatgtcctcattgtcactcttatgttatactttgtgtaatatatcatcttttaggaggtggctgtcatgaataaagctgaaaggcaaaatataataattactgcaattcaacaaaataaaaaaatgaccgctttagaattagctaaatattgcaacgtatccaaacgcacaattttaagagatattgatgatttagaaaatcaaggtgttaaaatttatgcgcattatgggaaaaatggtggttaccaaatacaacaagcacaatctaaaattgcattaaacttatctgaaacacaattatcggccttatttttagtgcttaatgaaagtcagtcgtactcgacattaccatataaaagcgaaatcaacgcaattataaaacaatgtttaagtcttccacaaacacgcttaagaaaattgcttaaacgcatggacttttatattaaatttgatgacacacaacatatgacactcccaatgctgttttccgacattttaatttattgtacagaacgaaatgtgatgttagtagatcatagggttgatgataatattaaagctgaaaacgttatatttattggccttttgtgtaaacatggacattggcatgcagtcatttatgacattgctcaagacaaaactgccgaactcgaaattgaaaatattatagatatttcgtattcattcggtaagacgattcaaaccagagacatatccattgataactatcatcaatttttaaaccccatcgattcctaaactatggagtcgatggggttttatctacgcataaatacttattactgatataacgaaagaaacaaaattatttgctatatgtaatgcaattgttgaacctaggtttcttccggattttaaataagtgaaaactaatatgatggatagtatgagatatggaccaaactcaaacggcgactttgcatcagtcacatgaataaatgcaaataagaacaccgaaacaatactcatagctataaaattaaacttcttacctaattctccaattaaaatatgtctaaatacgatttcttcaactattggacctacaatcacaattaataagaatgctacaggtaaaaatgcaggcacttcaaacattttatttagctcaagttcattggctgtttcactatattgcaaatgtttaggtagaaactgtgtcatatattcatatgtataaattaagatgagagcaataatatacgttattgacaatctaagccaatattttttgatatacgcaaaaccagctcgaagccttgatggcatcacttttaaatgaaataaataaaatgcgccaatcccaatcgtatatgctaaagcttgtgtgatagtcgctacaaatatcagattactatcgatttcataataaccaaacaaaattggtcctatgtaagctgcaattgtgagtgcataaaatataacacctataattggaattataagcaaatctctccatgctatatctttaaacgtgtatttcttttttttcattttccactgttatatcctttcctgtttaataattgatttttggaggtacttctacatgataaacgaaactaagtatatgagacaacaaattactaatttgattcaaatcattgatacgattaaatataatactttaatgacagattggaacattcaaacgcatatttataaatttaaccaaatagttactaatgaattgaataagttcaaaggctttgaaacatcatatataataaacgaaaatcaagtttcctattatgaaattataacactacttaataaacgccccctccgacaagtcgactatggtaacaaaattcaatatcttaatttttatcatacacaactatctaacgcattatttgcaattaaatttgcccattaacctatttttcataaaatgtcatttaaacaagttatttattaaaattcactttattacataaattatacaattaaaaagtttcttcaaattgtaaagatgcattaatcgagttataatcataatgattaagatggtagatttagtcttatataactacatttactaagatttaaatagatgagtacataatgtataaattgggaatatacagtatgacttacggtaatatatcaatatattgatatattatttgcacatgggagtatgctattttttatctatacatcttaaaaatatttacagttttataattcaatatcattaaacaaacaacatattcagcttatttttcattctcttacgttacaagttgtaaataccatcgcgttaaacaacaatagccaacgctaataaaatatattgcgttaaattggagtgattaatatgtcaaacgtactaacagaaatagatagtcaatatccatatatgactaaaaatgaaaaaaagatagctaaatttatactaaattcacctcaaaaggtgattaaaatgaggtctcaagacttagcaagcttattagatattagtacatcatcagtcattcgattcagcaagaaaattactgatggcggttttcacgacttgaaaataaatatatctaaatatgttcctaaagcatcatcaatttacaatgttgaattaatgaataacgaaagcacagaatctttaagaactaaactccatacacgtactacacgcgcacttaatcatgctaataacgaattaaatgataaaactattgatcaaatatgtcattgtttaaaacgttctgagacgatttttatatatggttttggcgcatcttttgtagttgctaccgacttataccaaaagttatcaagaataggtcttaatattcaacttgttcaagaaacacatatttttgcaacattattagcaactcacaattcgaacgacagtgttattcttattactaacaatggtacgcaaagtgaaatgcaatcaatggttaaagttattgatgactaccatatacctataattacaattactagtacaagggataatcccgtagcacaggcatcaaatattgttttaacttatgggaaaactgatgaaaatgagatgcatatgggagcaacaacttcattatttgctcaaatgttcactattgatattttatattatcgttatgttgcattaaattatcacgcatcattagatttcataacacaatctaaaatggctttagataactatcgtaaacatttatcaaatattaactttaaacattaacagtcttatataaattctttaatcatgtcatataataatttatgcatcattttcaaagcttacatgtcttttatcttgtataacatacgcatatgaccaatgatttgataaggccattctatttcttatattaaaaacaaacgcagttgattaacggattcattccatatatcaattgcgtttgttatttttataatgctattttttattttaaagcccacagtaaaaactaacgataatattgccacttataagtttttcacactacaacttcgatttaagctatatttataaaaaaatgcgcctactcataacattctttggctatttaactttaataagctagggccaagtttgtcataagataagcgcacattataatcatactattttgcttttacattatttttattatatctaataaaataataaatcgttacaatcgttaagaagatgacaccaataagcactgatattctagtttcaacattaaataccataccaaccaatactaatattaagaataagattgttaagtagttagttactgcgccaccaggcattttgaatgggtgaccttccaattcttcagggtgtaattttctaaaacgtaaatgactgaataaaatcataaaccaaggaatcatacctggtaaaatagacgcactataaacgtatacgaaaatactcttcgctccatcgatatataaaggtaaaattacgtttaataaagcaccaattaaaataccaagagatactgctacaacagtgtacaatggtacaccatttctcatgattttagtaaatattttcggcatttcacctttatgagcaagtgtataaatcatacgactcgcactgaaaatacctgagttacatcctgacattgctgcagttaatacaacaaagttaattaatccagctgcaaatgtaataccgattttagcaaatgttgcaacaaacggacttccaatgtctcctaattgattccaaggatacactgaaacaataacaaaaatagcacctaaatagaaaattaaaattctccagataacaccattcactgctttaacgatatttttctgaggatctttagtttcacctgccgtaatacctatcagttccacaccttggtatgaaccaattacaattgataatgcaaagaagaaaccaacaataccatttggcataaatccgccatttgtccatagattagaaatacctaccgcatggccaccatttccaaaaccaaagaaaataagaccaaaaccagcaataatcattaaaataattgttacaactttaattaaagcaaaccaaaattcaaattctccaaacgcttttaccgagaataaattcgctgccattaataataaaatagcaataacaccaggaatccaagttggcaattccgggaaccaaaacttcatatattctcctactgcgatgacctcactcataccaacaacaatccattggaatatattactccatgctgtcatataacctgctgcaggatgtatataatcacttgcaaatgttgcaaatgatcctgttgtagggtttaaataaatcatttcccccattgctctcatgattaaaaataaaaagatacccgcaattaaatatgcaaggataactgatggccctgtccatttaattgtacttgtcgcacccatgaaaagccccacgccaatcgtaccaccaagtgcaatcatttgaatttgacgggcactcaatcccctttgtagttcattgttctccataacttcttaccccatctctgattgatactaaataaatccataaaaaaacttattgccgtaattatactataaatcatcgattttggtacattaatatttgcataccatgcaatcgtttacagaactactatagcaggcttttgcaactttgcaaacaattattttgtgatttttctaaaaaattaaaaaagttgctcaagtaccgttgagtcacatacaacttcagctattctcggtaattatgatataattttaataatattaaaaaggagtatatcaatgttaaaacaaatactgccacgtgctacaaaaatatcggtactctttgctgtagcatttttcatcataaattatatcggtatggaaaaacctgacatcctatatttagttggaagaactattattgcaacacttgctttcatactcatttgtcttacagtatttactattattaattctccagagcgcaagattaaactcggtacgactttaccgattgcattaattattggtatcattttcggcgccatatttttaacggtacaaatcggtgtcatcactgggttaatcatcggtgtgattgctacgtttatttgggaattgattgaaaaaaataaaggaggtcgttcatcatgacaacagcattaattggtgtaattgtattaatcttactaattattagctttgtgccaaactaccgtgctatgaaatcagcaaaagaacaaggaagtaatgcaacaagagctacaattatggtaggcatagatattatcttaattgtacttatcatcgtgacgttattattaaaatatatgtaactatttaaaccaccctatctcatacataaacatgaacgttctaccatttcacatacatatggtcgtccatttaatgaggcaaggtggttttctcgttaaagtttaccttgtaatagtaaaaaatagccaattgttgcgagtattaagtaaatcattgaaccaacaacaaaagatcttacttgcacgcgaaatggtgtctgtttgttaaatataggaccaatcaccaaatttccaacgcctaaaattactggaccagctagaaaaaacaatataatgtaacccatcatgatacgcctcctatttcgtaaagaaacgcgctacaatttgatcgtaatcaatatcttttgctacataatctacattagaaaagtcctgtgcgcttgtcattttattcgtattaacaataacatctaatccagctgcaatcgcggctgttgcaccatttacagaatcttcaatagccaaacattgtgtcggcatataatttaattgttgtactgcagataaatataattcaggatcaggtttaacttgttcaacatcttctctaccaacaactacctctatataatcatctagacctaatgctttaaaggtaggcattatttccgctttcacactacttgtggcaatcgccataggaatgtgacgttgctttaaaaatgccatcaatgatttaatcgtatcaatcatcggtaatgttgtactagtaagatgatgttcttcataaagtttatctttattttccgaaccaatcgctttaattaaatggtcatgcaaatctgtagctgctcctccaatagaagaacgataaaaatcaatgcttataggatcggcattatgcatctctaaatgtttattaataacattaaataaatgttgttccgtatctattattgttccatcgaaatcaaatataactgctctatacatatatttactcctctattttttctctttatcaaagcttaacacagtccgatgaccacttcattctattagtgcaattataacttttttgaccaatactttgctaaaataggccctgttatattatgaatgaaactaaacactgcgcctggtactgctgcaattggattaaaatgcaatgctgctaatgacacagctaaaccagagttctgcattccaacttcaatactgactgctttttgatcttgtcgatctaattttaaaagacgagctaaccaatatccaatcgtatatcctaatacgttatgtaaaataactactaaaaatattaataatcctgtagttaagatttggtgcttactgccacctacaactattgctaaaattaatgaaatagcaacaactgatataatcggcaaagctgtagaagctttttcagcaattttacgattaataatttgcaaaacaatacctaaagcaattggaattaatacaacttgaacaactgaccacaacatactcaggaaagatacttccaaccattcatttgcaaatagatatattaacgcaggtgtaacgaatggcgctagcaacgtagagaccgtcgtaatagaaacagaaagtgctacgttagctttggctaaataactcattacattacttgatgtcccacccggacaacatccaactaatattacgccaacagcaatatcaggtggtaaatgaaaagactttgcaattataaatgctaatgtgggcataatactgaattgtagacagacaccaataattactgctctaggtgctttaaagaccattttgaaatcattaggtgtaattgttaatcccatacctaacataacaataccaagtaaataaggtacccatttacctaatgtcgcaacatgttgtgggaaaataaatccaataacagctgctactaacatccataccaaaaaactcttcgtggcaaatatactcaatttttgaaacattgttaacacatcctcgtcgataatattgaaaaatattaccataagaccagtaaggttacaattacttttctgaaaattaagattatttagtcgttctcttcttattgcaaatattttatcactgataaacaattattttaaacttcattcaaaagtcttagtgaataaagaaaaaaagcgtggtaaaatcaacttgaacaaaattaagtcacctttataaatattaaacgtgtatttaatgccatgtattcctcgggaggtcctcacatgttaattgataaattcgaaacatacatcatcaacatcgccggtttaaatgaccgtactactagaaaaaaattaagtaagttatgcaaaagtgtacaattttgtgatgcgttgcaattctcaataaacaaacagtttaatcaatatgtattagaaattagcttaccaaagcaacaacttccatacttcatttcatttttaagttttcatcagtatagtattttccaagtactttcaccaaagaaaataaatgaattacttgattctgataatttatatcaatctgcaaagcgtttcgatatcaatattgatggcttgcaagatgctttcattaaagacaaagtcatcgatattatgaatatgttccaaaatcacactgatatcacttatacgttgaataagtctcatgcacatattatatgtacgccagaaatatttgctaaattgttacatacgattgcaactagaaatatcgacattctatctgccaattatagatcgtcatctatgagcaaagctcgtatatcataataaaagacacatctatacgatgatcatttacaatgattgcgtatagtgatgtgtctttttttgtattatttatcttcggacgattgatcctcaaccatttgttcaaatgcttcacgaacttgtggtactgtcatacctactacaacttggatactcttaccactctttactaatccgtgtgccatttgttgatgcgtgaaatattccgtatccgcaactttactttcatcataaacagttaagcgtaatcttgttgtacagttagtaacatctttgatattttctttgccgcctaaaccgtctaggtaatatgcagctttgtcttcgtattcattaccagttgaagcacgtttagaatctacgctatcaccttttttatttttgtaatcttgcttagaaaataatttaacttcctcttctgttttcttacgtccaggtaatggaatatcaaatttcaaaattaagaatctgaataagaagaagtaaatcgctacaaatatcagaccgataataacttgtgcaacataagtaccccaatgttctttacctaatggcaaccagtttgttgaaataaagtctaacaagccaccacccatgttacctacaacaccaaatgcgtacattaaagtatccattgatgctgctaaaactgcgtgtaaaacaaataagtatggtgcgatgaataagaatgtaaattctaatggctcagtaatacctacaacgactgctgttaatgttgcaggaataagtaatgctgctacttttttacgattttctttaggtgtcgtagcatacattgctaaagcaatacctaaacatccaaatactttcccatttccttgaagcataaagccataagggaattgctcttttaatggcttagcactcttagcaaactcatttaaatgttgtaaccattcagctttcaagccgtgattgactactactggtccaacttcaattggtgcataaataaagtgatgtaatcctgttggtattaatacacgttctaagaagtggtacagccaaacaccgatatagcctgaagcgatgataaagtgttgcattgaaccaataccgtgctgaacagttggccaaataacacaagtaattgctgctaatggtaacatcacaaaaaatgaaatcgtaactacaaatgttaaaccttggaatacaccaaccatttctggtaatcgtttactatagtatctattgtgaatccaagtaataatagctgaaataataataccacctagaatattcgtatccaatgtggcaatacctgcaattgattttaaaccaggtacattttcaacgcctttttctaaattagcgccaaacgtatgtggccattgcgttaaaatggcatttataaatgtattaaacattaagtaacccatcaatgctgcaagtgctgcatgacctggtgcttttttagctaaagaaagtggtagacctacaacaaatacaacttccatatgcgtaaaaataacccagccaccagattctattactgaccaaaatttaaaccaaaacgtatgttgatctgctaaactccccatgattgtaggatttttaaataatgtcgcaaagccaagcactatcccaaagaaagcgaacattaataccggtacaatcattgcactaccgaaacgctttatcgcattcatcttctattccctccatatcatctttcctaacaatacatctaattagattcatttataaatagatgtcttactatttaaatataatatatagtaaacgcttacacacctacaacgacattgacgtattttgaaagtattttgtataatcagattatcttttcatatagtgaaaattttttcacgaccttatatatgacatcgttgtatttgtaatacattcgttttaaacgcataatcaaacctatatcaatacacaaatatatataatgacatacaagattttaatgtaataacgatctatcacacatttattttcaaggaggttgaatatgtttttagatgaacacattaatcgaaactttgataaacttaatgataatgatttacatatcgctcactttatcaatacacatatagatgaatgtaaaaatatgaaaatacaagatttagcgcaattcacacatgcctcgaatgcaaccattcacagatttacacgcaaattaggttttgacggttatagtgattttaaatcgtaccttaaatttgaaagtaataagacacaccaattaccttctaactctatcgatagtttcaaacaagaaatcgatagtacattcagttatttagaacgcgttgattaccagcttcttactgaaaaaatgcatacagcttcaacaatatatttgtatggtacagggcgtgcacagttaaacgttgcttcagaggcacagcgtatactgttaacgttacataatcatgtcattgtacttcatgatgaacatgaacttaaaatgattttgaacaagagtgaacctaatgatttattctttattatttcattatcaggtgaaacacatgaattattagaagtaacaaacttgcttcaacttagacaaaaatactttatttctgttactacaatgaaagataatacccttgctcaaaaagcaaattacaacgtctatgtatccagtaacacattctacttaactgatggtacagactattctagcttcatcagttatcatatattctttgaaacacttgtaagaaaatataatgagtatttactacataatgatatttcaaattagaaaaaaggaagttatgatttaatggccttgagcctatcataacttccttttatcattttattgttgtgttgatgtttcgataacgtggtacatcttatcaaacatcaattcgaaaccatgcaccatggcatcatgatattcttttttcttttgcttgtattctaaattagtaaatcgtctttctttttcaactaatgaacgataataaaatagcatttgggtgccacctgtttcacgttcaaaaaattctacctcaatgacatcttgtgtttcacttagtccaggcataccgatagtcatcttaacgtattcatccataactaaagattcataaatgccttcaatcacatttactttgccattacgttgttgatctacaatacgatatttaccgccttctttaacgtccgcttcaatctctttattcgttctggctgatgtcataaaccattgtttcaacaaatctttctttgtccaagcttcgtatactaactctggagaaaatttataaagcttttcaatttcaacttcgacatgttcattctctacattaaattttgccactgttgtccacccactttcgctcttacttttattttaacgtatttttgctcagttccaaacatagatgatcatcatttttaaaagattagcgttatacggtgagtacaacatgatctgttaatataacaagccaccttacttggctacatcgatatattgttaagcattaatgtttcatttcttgactagtgttcttttttagctttggaaaattaaataaaatcgcaataagtccgcatacacctaataatataggataaatgctgtatgggaataacattaacggtgaaataccagctacaccagccgctgaaatgacttgcgggctatatggtaataaaccttggaagcagcctccaaatatatcaagaatacttgctgatttccttgaatctacatcatattcatctgcaatatttttagctaaaggacctgacataataatagagatggtgttgtttgccgtggcaatatctgcgacacttaccaaactcgcaattcctaattctgccccacgctttgattttactttagagcgaacaaattgcaacaaccattcaataccaccattgtgttgaataataccgactaaaccaccaattagcaacgcaatcatagcaatatcttccatgcttataatacctttggacactgcatctagtagccccatccaaccgaatgaaccatctatgagaccaatgattccggctaataatgttccgccaatcaatacgataatgacatttacacctaataatgctaataccaatactaaaatatacggtacaactttaattagattataatcatagcttttagcatgatttaaagaaatgccattcgttaagaaatacagaataataatcgttaaaatagcacctggcaatacaattttaaagtttactctgaatttatctttcattttcgtatgttgtgttctaaccgcagcaattgttgtatctgaaatcattgatagattatcgccgaacattgcacctccaacaactgtagccattgctagcgcagttggtacatctgtcgcttgtgcaaatccgtaaccaacaggtgctattgcagcaacagtccctactgacgtccccatagatatagaaacaaacatacaaatcacaaacaatcctacaataattaaattttctgggattaatgatagtcctaaattaactgtcgactttacgccacccattttttcagctgtatttgaaaatgcacctgctaaaataaaaatcaacatcattaaaataatgtttgaatggcctgcacctttcgtgaagacctcaacttttttagcaaatgattcttttcgattcattaataacgccacaattaccgttatcgtaattgcaacatttaatggcattgaagtaaaatcacctgtgataatacctacgcctaaaaacaacgccacaaataataacaaggggaataatgcccaagcattgctctttttatgtacttccatcctttttacctgctttccaattaaaaatacctctttctcacaaacgatgaagaaagaggttttcatgtgctttacctgcttatcttcaaaccattacggttactggaattggcacattcgagatgttgccgaggcttcatagggccagtccctccacctctctagataagtgatgcttatttacgtttacgttacaagataatccttagtacgtcaatcataaattaatcaggagtcgtataatatttttcataaacaatcattgctactgtaataataatcaaaacaataatgctaataacaagtaaaagccaccatttaagcattaatgcaataaaaatgaacacgatagacacacttactaatattaatgatatgactttaaattgctgaacacgttgcttggagatgactttcaactgtttgtttgatagacgcgtattttttatactgattcccagtatattttctaatatttgaaccaatacgatacttattgcaaatataataattggtaaaacatcatagctccctatagttaatgtataaattacaaatccaatgtaaagtaaccctgagacaaaggataaaaagtatgcgacgtatttgttaaacttaatgatatgctttttaacgttttgatgtgtaaaccatacattcgaaacgatcgcaactgctacaaataatgtgaatactatatataatggtaatttttgttcaggaaaaacagtcgctattccaaaagctaatgctaaaatcaaaaataatatagctctagatactattaatgccataataacaacccctttgtttaatatcgagtttgcaaatttacgtttatcagcgtttctatgatcagtacttctacgggtagcgtttctatgtaatttacatcatcttaacatataaatacttcgctatttaattgaaaacatatcctattattctttgtccgttctgacgtttaatatctagccttaggtatttcacttgttaatgaatttaactttcttccactaaccgtccctaaacccaatcccgcaacattttttaattttttcgttgttgtcctgacatcctcattaagaaagtttattctgcttaaaccttataatccacaccctgagcaaacgctccttatgacagagtattaaaataagccgataaagatacacacctttaccgactatttaaaatacacttcaccaattcattttaatttaatggattgaagtaactaaattaatattatgttgttcaattaaaagcttcatacaaacctaatctatttgcactccaccgctaacaccgaacacttgtccagttgtataacttgattcttctgacgctaatagcacataagttccacataactcaacaggttgacctgcacgacctaaaggtgttttttgatcaaatgttgggattttactttgaggttgtccaccagaaatttgtaatggtgaccagaatggaccaggcgctacacagttcactctaattccttttggtcctaattcttctgaaaaacttttagttaatgaaataattgctgcttttgaagcggcataatcatgaagaataggactaggattataaccttgtacagatgatgtcgttgtaattgacgcacccggttttaaatattccaatgctttttgaactgtccaaaatagcggatagacattcgtttcaaatgtttctgtaaatgcctcagttgtaaatccatgaatatcatcatgatactgttgatgtccagcaactaaagtaacattatctaagccacctaattgttgatatgcttgttcaacaaggtcatagttgaactgctcatctcttatatcaccaggaattaacactgccttttgaccactttcttcaatcacttggcgtacttcttgtgcatcttgttcttcactcggaagatagttaatcgctacatctgcaccttctttagcatacgcaattgctactgcacgccctattgctgagtcaccacctgtgactaatattttatagccttgtaagcgttgatgaccttggtaagacgtttcgccacaatcaggtgctggcgtcatttcagattgtaaacccggtacctcttgttcttgtttttcatattccgttgttttaaattttgttctaggatcttgagctgccattttttaacatctccttattcgcttaatggttattatttacccaatcttcctaggaacttaatcatgattacactaaaaattactttcttctttataaaaacaagctcgaattactcatgcaatagtctttttacaaattcaacaaaatactcaggtactttttcaagaatcctttcatccggtttatattgaggatgatgtaaatcatattcactatgagaaccaattaacgcaaatacacttggaaaatgttgactataacctgaaaaatcttctccaatcgtaagcggctgttccatcatttccaccttatatccaacatgttgggctactgcaattgctttatgcgtcaatgcctcatcattcatcacagcgccaggtaaatgtgtataatttaaattaattttcatattatatgcttgagccaatccgtccgcaatatcttgtaatcgtgtttctacaagctttcgtaccacaggatcaaaactacgcactgtgccttgtacatacgcatgatcagcaatgacattccaagtattaccacatgatatttgtccaattgttactaccgcttcatcaaacgcagatagatttctactaactatggattgaatactattaatcaattgcgccaacacaataactggatcgttgcattgttctggctttgcagcatgaccacccacgcctttaatatgaaactcaaaacgatctactgctgatgtaattgcccctgttttgattgcaaatgtacctaccgaacgcgatgggtcattatgaaaccccaatactgcttgtacatcttttaatgcatgtgtttcaataattttaaaagcgccatgtcctagttcttctgctggttgaaaaatgaatttaacacgcccagtaagagtgccctcaatttcttttaattttacagctgtagccaaaatactagccatgtgaatatcatgaccacacgcatgcataacaccttcattttcagatttaaaatcctgttcaacaagctcttgaatcggtaaagcatcaatgtcagcccgaacagctatacaactcagaccttgtcccacttcagcaaccagcccagtcataagcggtaagtctaatattctaatatgatgtcctgttaaaatatctttaattttttgtgtagtcttaaattctttatcggatagttctggaaattgatgaaaataccttctccaggtaacagcttgatcttttaatcccatcggtcattccccttccttaagtcaatgatatgttgtctaccctacgatgatcatctttgactattaaacgatgatttcacaacaatgtactcttgttaattgctttcgttaatgatagacagttatttaataatatcgtaacactgttgtcaaactattctaacttttataattgagactctatacaaaaacgtgttctcgaatatacttgtttttacaaaccacaaaaagctctaaacattagtttaaaccaatgcttagagctttctaattattttatgctttaaaagatactgtgttatctacgatgaccttaccgtctttaataactttttctgcgtgattgataccaaaatgatatggaatatattcatgatttggtgcatcccaaattactaaattagccttatcacctgtgttaattgtacccgcattaatgtctattgctttagcagcattgaccgtaacagcattccaaacttcattaggtgatagctttaatttcaaggctgcaatcgccataacaagttgtaagttgtttgtgacactactaccagggttataatcagttgctaatgcaatcgcaccgttattgtcaagcatgcctcttgcatctgcataatcttctttacctaaatagaacgtcgttgcaggtaagaggacagctacagtatcactatttcgcaacttttcttttcctttatcactagaagctactaagtggtctgctgatattgcttgttcatcaattgctaattccagtccgcctaacggatcaatttcatccgcatgtattttcactttaaaacctgcttctttggctttttgcatataatgttgcgattgttctattgtaaatacacctgtttcacagaaaatatccgcaaagtctgcatattgttttacttccggaagtaacgcaatcatttcttctaaaaatgcctcatttgaacttgcctctttaggtacagcatgaggccctaggaaagtatgtttcatgtctaaatcatatttctcagctaaacgattagacactttcaattgcttcagttcattttctctatctaatccataaccactcttactttcaactgcaagcacgccgtgtttaatcatagtaagcaaatcatgctctgcttttttaaacaagtcatcttcggatgtttctctagtagcattaacggtagataatatgccaccacccatttctaatatttcaaggtaagacttaccttgacgttttaatgacatctcatgttctcgagatccaccaaatgttaaatgggtatgtgcatctactaatgctggggacactaccttcccactagcatcaatcgtctcagtcgcatcgtagtcatctgtatgtgttccagcatatacaattttgccatctttaatgacaactgtaccatttttcacaacatttaattcatctaattccttacccttcaaaggtttatctgttgatctcggtaaaattaattctgctatatgattaattattaaatcattcattacttatcacctgctttatcaatcattggaatatgaatacctttttctttagctgtttgaatagcgatgtcatagccagcatcaacatgtcgggcaacacccatacctgggtcagtcgtcaatacacgttccaatcttctttcagcacgctctgatccatctgctacaacaaccatacccgcatgaagtgaatatcccatgccaacaccgccaccgtgatggaatgaaatccatgaaccacctgcagctgtgttaatgagtgcattcaatacagcccaatcaccaaccgcgtcactaccatctttcatactttctgtttcacggttaggactagcaactgaaccagcatctaaatggtctcgtccaataacaattggtgctgaaatttcaccgtcacgtacaagacgatttaaagctaagcccattttcgctctttctccatagcctaaccaagcaatacgtgatggtagtccttgatatgaaattttttcttcagctaaatcaagccatcttaataacttttcattttctgggaaaagtttgcgcatttcttcatccgcacgctcgatatcttttggatcaccactcaacgcagcaaagcggaatggccctttaccttcacagaataatggtctaatgtaagctggtacaaagcctgggaagtcaaaagcatttttcactccgttattgaaggctacttgacgaatattgttaccataatcaaatgctacagcgccacgtttttggaattcaagcattaattcaacatgctttgccattgaagcttgtgacagttcaacatattttttcggatctttttcacgcaatactttcgcttcttctacagagtatccttgtggcacatatccatttagcggatcatgtgcacttgtttggtcagtaataatgtcaattttaaatcctttttctagaatcgcttgatggatgtctacagcatttccaactaacccgattgataatccttctccacgttctttcgcctcttctgctaattttaatgcttcatctaaatcagctgttttaacatcacagtatttcgtatcaattcgcttatcaacacgtgtttcatcaacatccacgcaaattgctaccccatgattcatagtaattgctaacggttgcgcaccacccataccacctaaacctgctgtcagtgtaacagtgcctgctaaatctccattaaagtgttgattacctagctcggcaaatgtctcataagtaccttgcacaataccttgagaaccaatatatatccaactaccggctgtcatctgtccatacatgattaaaccttttttatctaattcattaaaatgatcccagtttgcccattcaggcactaatactgaatttgaaattaatacacgtggcgcttcttcatgtgttttaaatacagcaactggctttcctgattgtactaacattgtctcatctgattctaattctcgtaacgttttctctattgcttcaaaagcttcccaattacgtgctgcttttccaataccaccataaacaactaaatcttctggtctttcagcaacttctgggtctaaattgttgtataacattctaagtactgcttcttgttcccaacctttacactcaatactcaaacctttttttgcttgaatttttctcataaaattcgctcctgttctttttagaagttaattccactaaatttaaaacgcttacattattatcttcaatattcattatagtatgttaaaatatagccaacaaatataaataaactaattatccatagcttgaatctataaataaaaggagcaaaacacatgaaaattattcagttagaatacttcttggctatcgtaaaatataatagttttactaaagctgcacaatttttacatattagccagccatctttaactgctacgattaaaaaaatggaagcagatttaggttatgacttatttacacgttcaacaaaagacatcaagattaccgaaaaaggaatacagttttatcgttatgcgagcgaattagttcaacaatatcgatcgacgatggaaaaaatgtatgatttaagcgttacatcagaaccaaggataaaaattgggactcttgaatctacgaatcaatggattgcgaatttaattcgaaagcaccattccgactaccctgaacagcaatatcgtttatatgaaatacatgataaacatcaatctatagagcaattactgaattttaatattcatttagctataacaaatgaaaaaataacccacgaagatataaaatctattccattatatgaggaatcttacattttattagcacccaaggaaacatttaaaaatcaaaattgggtagatgttgaaaatttgccactcatattaccaaacaaaaattctcaagtgcgcaaacacttagatgactattttaatagaagaaatattcgtccaaatgtcgttgtagaaacagatcgattcgaatcagcagttggatttgttcatctcggcttaggttacgctatcattccgagattttattaccaatcatttcacacgtctaatttagaatataaaaaaattcgtccaaacttaggccgaaaaatttatatcaattaccataaaaaacgcaaacactccgaacaagtacatacattcgtacaacaatgccaagattatttatatggacttttagaggctctttaacttaagttattagagcctcttatgcagttgctcagtcaactgtaaaacaatttcacaaccaattttatgatttacatgtataaatcattacattcagaccaacaaacataaataagcagtaagatgactacaacttaagagtcttcttactgcaattatttttcaaatatatcaacgttaatataacttctattaagaaatactcacattctgccctgcaatgcaaatctcgtcacatataaatatttttaattattttaaaaaatgatgcactaaattagcaacgagcttagcagttctattgtcagcgtcatatgttggattcatctcagcaatactaactgaagacaccttatcacttggaataatacgttttgctaattcaagaacagtatgtggatacaaacctaacactgccggcgcacttaccccaggcgcaaacgcactatcaatgacatccatacaaatcgtaaacataatgacatcatgttcatgtacaaaacgttcaatcatatctttaattgttggtgatacgtgactcaataattcatctgcaaagacataatcaatctttttctctttagcataatcaaataaactttgcgtattaccaccttgagcaataccaagcactaaataatctgtgttttcatcttcttctaaaatttgtctaaagctcgttccagatgtagattgttgttcagcacgtgtatcaaaatgcgcatcaatatttatcacaccaatagattgtgttggatagactttacgtgttgctaaatattgagcatacgcaatatcatgtccaccacctaataaaaatgtttgtctatgattagcaattgacttcgctgcaagcatagcaaattctttttgagtatcaattaattcctcatgatcatgataaacatttccgtaatcgactaaagtttcacattgattcaaatccggcaaacctgcaaatgcttgtttaatcgcatctggtccttcttttgcaccaatgcgccccttgtttaaagcaacacctttgtcaacagcatagcctaatataccgacccctgatggcatactactcttttccagcttagacaaatcttcaaatgttactgtttgaaaatgtctaaattttttcgggtctgtttcactatctaaccttccagtccataaatttggttcaccttgcttgtacacagcatttccccctcttatttatgtggcttattaacaattaaagtataacgtataggaaattttgaattcaattcatagttaaatccgtatcttaaaaatacttatctacattacttttacccctattttctatgtaataacgaatacttagctgatttatgttaataaaatacgtcaagactattacattttcattaatattgacatagacaatttatctctcggcttgtaatatgtataattgttactaaaagatattttgcttgttacctaatggaggttacatataatgaagaacaataaaatttctggttttcaatgggcaatgacgattttcgtcttctttgtcattacaatggcgttatccattatgctcagagatttccagtctataattggtgtcaaacactttatatttgaagttacagatctagcaccattaattgctgcaatcatttgtatactcgttttcaaatataaaaaggtccaacttgcaggtttaaaattctcaatcagcctgaaagtaattgaacgtctattgctagctttaattttacctttaattattctaattattggtatgtacagctttaatacatttgcagatagctttattttattacaatcaacaggcttatcagtacctattacacacattctgattggacatattctgatggcgttcgtagtagaattcggattccgttcatacttacaaaatattgttgaaacgaaaatgaacacgttctttgcaagtattgttgttggtttgatgtattcagttttctcagcaaatacaacttatggtacagaatttgctgcttataacttcctttatacattctcattctctatgattcttggtgaattaattagagcgactaaaggacgtacaatttatattgcaacgacattccatgcttcaatgacattcggacttattttcttgtttagcgaagaaatcggcgatctattttcaatcaaagtcatcgccatttcaacagcaatcgttgcagtaggatacattggtttaagcttaattatccgaggtattgcatatttaacaacaagacgaaaccttgaagaacttgagcctaataattatttagaccatgtcaatgacgatgaagaaactaatcatactgaggctgaaaaatcttcttcaaatattaaagatgctgaaaaaacaggtgtagctactgcatcaacggttggtgttgctaaaaatgatactgaaaatacagtggctgacgaaccaagcattcatgaaggtactgaaaaaacagaacctcaacatcacataggtaatcaaactgaatctaatcatgatgaagatcatgacatcacttcggagtcagtagaatcagcagaatcagttaaacaagcaccacaaagtgacgatttaacaaacgattcaaatgaagatgaaatagagcaatcattaaaagaacctgcgacttataaagaagacagacgttcatcagttgtaattgatgcagaaaaacatatcgaaaaaactgaagaacaatcttcagataaaaacaaataataacaaagcgcttgctagtacctcttaaaaagatgatgctagcaagcgcttttctatactatatattatttttctaaaattttaacaccctcttgagtgcctacaataacttgatctgccatatctaagaagtatcctgtctcaaacacacctgtcagatgaattaaatactcatggaacttatatgggtcaattccttttggtaacttacaatctaaaatataattgccattatcagttataaatgcgacatcttcgtttacacgacgttctacttttatatcagcgtatgattcaattttacgtaatatgtgataccagttaaatttatccacctctactggtaacttaaacgtctcacctaagtattgaactattttcgtttcatcgacaaccacaacaaaacgcgatgccatttcatctataactttctctctgaacagcgcaccaccgccacctttaattatatttaaagatggatctacttcatcagcaccatcaattgctaagtcgatatgatcaacatcattgatttcacatattttaatacctaattcttttgctaaaaatgcaattttattagaagtgcatacacctgtaatattgtaaccacgttctttaattagttgcgccatttgaggtaagagtaattccattgtacttcctgtaccaattcccagcgtcatgtcaccattgatttgacttaaaacatcatttaatgtcattaacttgagtgctttgacatctttcatgaaggtagcctcccatatttatgtaatctattcaattcatattttacatgactcgtataaattaacatacccttatttctaacatttttttaaacatatcaatcagaatttacaattctaaaaatgttttatagtacaatatattttaaataatactcgttaaggagaatgatatgatatcaattcacgcaatttcgacaggaaaaatccaagatttgccttatagctcgaaaagaccgatgcgctctgctttagataaaactaagatttcacaaacaacatggttatcttcaactggtttcactggtgatgaacaggcttataaagatcatggtggaccacataaagcagtttgtgggtttagtaagcataattatgcactgtatcaagatgatttacctacactacctactcatgcgatgtttggagagaatttaacatttgattatttagacgaatctgatgtttactttggtaatcaatatcgtttaggtgaagcgttaattgaggtttctgaaattagagaaccatgctggaaaattcaagcaaaatataatattcctgatttagtgaagcgcatgtctacatctggtaaaacaggtttctatttccgggtattaaaacaaggctatgtatctccaaatgatcagctttacttaatacaagaagcaccaatcgaacatcgtttatctgtacaacagcttaatgacctttattataatgatagacaaaatcaagatatgttacgatatgcactaaacaatccatttctgtcaccaacaagacgcgataaacttcaaaaaatgtataacagaacattgaaataattacctttcattataagtgttaaatgaacttttcaaaacaaaaaggaatcaacttacacatcgtttgtataatagtcttatctataaccactgatgctattgattccttttttatgttatatattttctttatttcaaactgtatattaatgatgtcacttcatttgatacgattcttgataacctattcaaaattccgccaaataacataaatattatataaatgccgatacttttaatcattttctactttttcttcgatacggaaacttgttttcgaattgaacacttcaccagcttttaaaattgacggtgctttttcaccatataaattaatatcatttggtaaaaattgtgtttctaatgtaaagccagaatgtggtttataaatattaaatggactatcccactcatcaggctggttaaaagtaaagaacacaacatgaggcatatctgtatcgacctctaacataaattcatgattttcaacatacattttatgttcaccaactgtaaatgggtgatcgagaccaccaaaacgtgtcatttgttggcttaattgcgcatgttgtgatgtaaaaatatcactcaattttatcttgttatcttcaaacacttcatgtaaatctagaatatcacctgtaacaatatttcgctcatctaatacatacatatctaattgattacttgaaatgcgatgattatcaacgacattattatctcgattcaaattgaagtacacatgattcgtaggactaaacaatgtgtcttctgatgcaactgcttcgtattcaatcgaccattggtgatccgcatcataaatatgtgtaatcgtcacatcgatatcacccgggaaatgatcatcagctgatttcaacaccgtcttaaatataactttaatttgagcaatttcatttctaatttcataatcaaataacttattgtccaaaccatgacatccaccatgtaaatgatgttcaccgttgtttttttctaactgatattctttacctttcaacttaaatttagcattatcaattctaccgctatatcttcctatagaagcaccaaatttaaaaggattactatgataaaattcatccgcttcaacaacatttccaagaacaatattattatcatgatatttccaagacactactcttgctccataattcgtaaaaataattttagtttcatcattatcaattttgattaaatctacaccttgtctttggtgctcaacttcaactatcatttttacttctcccttctaaccacaagtgttcaagctctgctgggtagcaacattactaaaacacctacaatacaaatgattgcaccgataacatcatatttatctggcatttgtttatctacgaccatcgcaaaaatcaaactcatgatgataaatacgccaccatatgctgcatatactcttccgaatgatggaaatgattgaaatgtcgcaatgacaccatataacatgagtatcgcaccgcctattagcccaacaagtgaagactgtccttccctaagccacagccaaatcaggtatcccccacctatttcacataagccagctaatataaatataaaaatcggatataacatgaaatcactccatcacacatttgctatcaataatctatcggctacatatcatttgtttacatttcttcttacttcacattcccattttaaaaagttcgttttcacattcatattgtacacttttttagacattattctatagctaaatataaaaaaataagagtaacacgctttcatcatcattttatatgataaatgtgtgtcactctcatcaattttattttttaaatacacgtttcattgaattaaataagccacgttcaaatgtaagtactgaatctttatatgttttaattgcaatccatatcaagacagctaccattacaattgagattaaagaacttaagatgacctcatatatttgaagccctgaagtttgagcgcgtacaactaattgaaatggcgctaaaaacggaatataacttgtgattaaagcaagttgtccatcaggattatttatcgtgaatatcgcgatataaaatgcaatcataccaagtaatgtcagtggcatcaaagattgatttaaatcttctattctagatgttaatgatccgaggatggctgcaagtaatacatacgccgtaattccaacaatactacttataattccgacaataataatttgccaagacaattgattcatttccacgttaaaaccttgtagcaagtcttttaagtcaaaggcaaaaatgcatataactgccatcaatacaattaaaataatctgagtcacggcaactgctataacgcctaaaattttagcaaaaatatgttggattggtgaaatacttgtaataatcatttcaatgacacgcgatgttttctcactagcaatttccatagctatttgagatgcataatttaaaacaatgaagaacattagaaagataatgccataagctaaagcatagttgaaaatcttttgtccttctgatactttatcgacttcatcattagaaatcaccttattatcaactttactttgtgcttgtaatttttgtaagtcttctttgttgatatttaattccctggctaccatatttgtttgaatagctgtaagcagtgcttgtactttttgtgaatcttcatgacttactcgcttctcactaatgattgtcccttgtaacgtgcgattttgattcaccttgataatataagctttatcaagtttatgtttttttacttctttttcagcatcttctatagaaactttagtaaacttagcatcactatgaaatgtattcgcctgttgcttgaaaaccttatagatttgttcattcggtgctgctacaccaattttatctggaccatcatcaaacatgttaataatcttatcaatgttagatagaccaatcattaaggcagcaataataatcataaaaattacaaatgatttagctttaatttttttgatatatgtcaaagtaaatgtcgcccaaaacttatgcatccttgccaccaaccttctcaatgaatatatcttgtaatgatggttctacaacttggaatcgtttaacataaccttgatgtgccacaacttgataaatatctttggctacgtcttcattctcaatcgtcaactgaagaccttgcttcatgttttcactatgaatgatgcctctaatgtttgttaaatctggtagtgttgtttctgattcaatgacaactttcttgttaccattagatgcacgtacatgattgatatcaccagaaacaacaagttgacctttatctaaaatacaaacatcatcacataattcttcaacatgctccatacggtgagaactataaacgattgtactgccccaatcatttaagtctttaactgcttcttttaataactcaacattaactgggtctagaccactgaaaggctcatctaatattagtaattctggtttatgtaacatacttgctaacagctgaattttttgttgattcccttttgatagactatcaattcgttttttgcggttttcagtaatatcaaaacgctcaagccaatacgatatttgctgttgtatttctgtttttgacattccctttaaagttgccaaatatttcaattcttcttcaactgtcaatttcccatgtaaaccgcgttcttccggtaaataaccaatacgattgtacattgttttatctagttttttaccgttatacgtaatgtgtccttcagttggttcacttaagcctaaaatcatacgaaatgtcgttgttttacctgcaccatttcttcctagaaaacctaacattttgcctgattctaactttaatgaaatatcatttactgccgtcatcttgccaaaacgtttcgtaacatgttcaattacaagtcccatactttgcctcctaaaaaaatatgtatttatcttaatataacatttccattctctataaatgcaatatttttaaaatgaatttatttttaaaatttctgaaattgaaaaatttaaatagtgccatttttgcatgttaagtatcattagcactagatatgttttttccatgcctttattgccttatttgtaaaaaaatatcccagcatcattgtgccgagatatttatatcattacaattgattatctgtttcttccggtgttttcggtgtttcagatgtacacgctttttccggtgtttcagatgtcactggttgatttttaattgtagacgggtattttgggctttcgccatatttatttgccggcttactgtcaaagcataggaatactatcataacaattgttaggcctaaataaacaaaataaagaagtactaacaaaatattaagacccatcggcattaatgtaaaatcactgtcataataactatcgataatctgtaatactatataaaatataatactgaatactgtcataatcattggaaataacattgttcttgatatatcgtgaaatcttcgaacgcacaacgctaaatttggaataaacgttgccaaactatagacaaaagtatacacagatgtaaggataatcatcaatatactcataactattaatgtttcgttatctgccgctatagaaataaagaatagaaataggtttattattagcacacacacagctggaaccataagtatcaaatgccatagtgccatataccaatattcactacgtcttgatctccccttaaaatttacataatttttccaaaataaaacgaatgatttcataaaacctacttgaggtaattgttccattgtaatctccctttcgttaatcatatttatatttttaattattgttaccgttataatttacaagattcattatcaagccacttcatttcaatcgtcaatcactttggaaaatgaactttatatttcatcactagtaaaatgaaaacccgctacaagtacacatctatatggagactcatttgaaagtcaacgcttcgttaactatactaaaaatatgtcatactgcaatgttcacgtttaaaagagtctcaatctatgcaaataaaatattccataacaaagtatatactttacatttttataattcttaacaatactattttatcaaacatttaccacaataaaaatatctttttcatttttatttaaattaatcatataattgcgaggagaatattatggatttcgttaataatgatacaagacaaattgctaaaaacttattaggtgtcaaagtgatttatcaggataccactcaaacgtatacaggctacatcgtggaaacggaagcttacttaggtttgaatgatcgtgcggctcatggctatggcggtaaaataacacctaaagtcacgtcattatataaacgtggtggtacaatttatgcacatgtcatgcatacgcatttactcattaattttgtaacaaaatctgaaggtatacctgaaggcgtacttatccgcgcaattgaaccagaagaaggtttatccgctatgttccgtaacagaggtaagaaaggctacgaggtaacgaatggcccaggaaaatggactaaggcatttaacattccacgggctatcgatggcgctacgttaaatgactgtagattgtctattgatactaagaatcgtaaatatcctaaagatattattgctagtccacgaatcggtattccaaataaaggtgattggacacataaatctttacgttacacagtgaaaggtaatccatttgtgtctcgcatgcgtaaatcagattgtatgtttcccgaagatacttggaaataaatgccatctttcattgattactatcatgaaaatgaaatctctctccttataagtcaatcaatcgtgccgtcaacatgcggatgggttgattgtttttctttgtatccatcatattttttgattcatctcctcttattgaacttgttcttaattataaaatataacaatagaattatttataattattaaatttagatgcattaatattattgatattattttcaaaaactagaaatattgatttgttgcatgtataatgttaaaagcgcccttttataacgcttacatataaaagcttatttagggagagggatattcaacaagggggatttgaaaatgatagaacttaatgcaattacaacattatgtttagcttgtatcctttatttacttggtaaggctatcgttaatcacgttaattttttaaaacgtatttgtataccagcaccagtgattggcggcttaatctttgctattttagttgcggctttggattcatttggcatggttaagattaaattagatgcttcattcattcaagatttcttcatgttagcattctttacgacaatcggtcttggtgcatcattgaaattatttaaattaggtggcaaagtcttgctattatactttatgttttgtgctatcatttcagtcattcaaaacatagttggtgtatcactagcaaaagtattaaatattaaacctttgttaggattaacagcaggttccatgtctatggaaggcggtcatggtaatgctgctgcttatggtaagacaattcaagatttaggtattgattcggcactgacagcggctcttgcagctgcaactttaggtcttgtatttggagggcttatcggtggtccagttgtaaaatttttaatcaaacgttataacttaaagcctcaacatagtgacgatacatttaaagattatagccaagtagcatataacgaacatttacatagtaaatttaatgccactgaagtattcttcattcaatttacaatcgttgtattctgtatggcagttggaagttatttcagtcatttgtttacagctcaaacagggattaatgttccaatttacgttggctcattatttgtagctgttattgtccgaaatatctctgaaagttttaattttaatattgtagatttaaaaattactaatcaaattggcgatgtcgcattaggtattttcttatctcttgcgctaatgagcattcaattaatcgaaatttataaacttgctatacctcttattattatcgttttagttcaagttgtcgttatgattttatttgctgttttaattttatttagaggtttaggaaaagattatgatgctgcagtaatggtaggtggttttatcggtcatgggcttggtgcaacaccaaatgccatggcaaatttagatgttattactaaaaaatatggaaactcacctaaagcatatttagttgtacctattgttggtgcattcttaatcgatttaattggtgttatagtcattatgggattcattcaatggtttagttaaacaccaaactcataaataaaagaggaggccttcgcctcctcttttatttatcctcgatgtatattcaagttacgttgttctatccatgacaatatttccggactaaatacgatttgtttttgtgttaagtcgtcaatatttttagcatctaacatcgtcattattgatttcatgtgttcaataaatgattctacataagctactgtatgtgcaatgccattattttcaacttgatttaaaaacggacgtgacataccagttgcctttgcaccaagtgctaaacttttaattgcatcgagtggtgtacgtaaaccaccactcgcgaaaactgaaatttcgctttgataagccgttgtttcaagtaatgactcaactgtagactgtccccatgatgataagtaatccatatctttatttgcacgacgttcattttcaatatctacaaagttagtaccacctttgccactaacatcgacatacttgacgcctatttgttgtaagtcatgcattaattctttgctcataccaaatccaacttcttttataatgactggaacagacactcgtgatacaatcgacgctatattatctaaccaagtcacaaattcacgattcccttcaggcataactaattcttgaggagaattaacatggatttgtaacgcttgtgcctcaagtaattcaactgcttccaaagccttttctactggtacgtccgcaccaacattgctaaaaatcatgccttcaggattcatttttcgcgcaatcgtaaacgtctcagccatgcgtggatttctcaatgccgcatgtgttgatccaactgccatcgctaagccagtttctcttgcaactacagctagcttttcattgatgtttttcgtccactcgctaccacccgtcattgcattaatataaaccggatatgccatcgttaagtcaggcgtctgtgatgtcaaatcgatatcatttacattaattgatgggatagaatgatgcacaaaacgcatcttatcaaaatctgaatgcattgcgtcagattgggccattgctatttcaacatgttcattttttctctgttctctttgaaaatcactcatgattaaacctaccttttcgtcatttctaatttaaaaccattttttacgtctgaaaaagatgattaatacgacagctataacaaacattacagctaagcaaatataatatccataatgtaaatgtaatgccggcatatttacaaagttcataccataaatcccagctatgaatgttaacggtgaaaatataactgatactaacgttaatacttgcataatactattcattctaaatgacgtgtatgactcaaaattttctcgtatttcgtttgtcatttcttgagcagtacgaatgatattacgttgcttaatcaagtggtcatcgatatgttgaatgtatagcgaatgtttattatctataatcaaatcaccattttgtttcattgtatcaattagctcttgcataggaaacagtacacgttttactttaatcaaatccgaacgtaacttaaagacactatccatgaccattttattaaagcgatcatctacatggcggtcttcaaaatgataaacactatcttcaagtgcatatacaaagttgaaatatttatcaaccatcatatctaaaattaatatgacgacatctgcacaatctaattctgcatctaatgtattcatatacttatagactactttatttaatgattccaacgtttgatgatgatatgttactaatacattgtcttgtataaaaatatttagtgctattggtgaatagtttgaccccataatactatggaatactaagtattgataatctttataagatttatatttagctcgtggcataccgttaattgcatcatccacttctaaatcattaaaattaaaatgtgctttaaaccattcattttcttgttcattcggttcatcaaaatcataccaaacaatagtcgcatcttttggtatctctttgatatcatcaactactttaaacggttcatatgtagtttgataccgtatctttaaagccatcgatactccccctaaataacgaattctctattattttatcatgaattaaataacgtgtatgtcttaatttattttagtatgatagtcactaaggagatggttattatcaaacaactttttacacatactcaaaccgtaacatctgaattcattgaccataacaatcatatgcatgatgcaaattataatatcatttttagtgacgtcgtgaatcgttttaattacagccacggtctttctttaaaagaacgcgaaaatttagcatatacgctatttacactagaagaacatacgacatacctctcagaattgtctcttggcgatgtatttactgttactttatatatttatgattacgattataagcggttgcatttatttttaacattaactaaagaagatggtacactagcatcaacaaatgaagtaatgatgatgggaattaatcagcacacacgtcgttctgatgcttttcctgaatcattttcaacacaaatagcacactattataaaaatcaatcaactatcacttggcctgaacaattaggacataaaatagcaattccacacaaaggagcattaaaatgacagatgcattacaacaaaagattcatatcgaattactagatttattagatgatgttaagtttgaattaacagaattaaatgcacaaaaagggttatacattaacggaccagcaaatcagctacttaagcgtggcgtgcatatggcttatgttcaaggacaaaagcaagccatcgataatattatgactattgtggaacaacagcttgaagatcaacatttcctagaacattatgataaatttcaaaatgaggttgctcatcgcaattatgataaaacagctaactttgcagaacttagtgatattccacgtcaattcgataattttttagatcaattttatcaaattaaagggcaatactttatcatcacacatatcaatacacttattggtgattttcactcagaagctcattaacaattagtctatataacccttgctatattttcaaaaacaaaacccaattacgttttcatgtcaaatatcatcttgcatgaaatcgtaactgggtcatttatatgttattagttattttgtgttacatcctcatctatcgatttggcaatttgtttaatagctttatgtgattgtctaattggataaattggaaaatcatgtaccatcttaggataatcataaaactcaatgtattgatgatgttgcaacatcatttgttcaaatagcttcatatcaggatgtgtcatttcacgtccaccaccaaacatataaactggtggcaatccttctattgtgccattaattggcgatatgcgcttatctgttaatggtaggccattcgcccattttttcataatctcattgacaccaaactgacttagaaccgcaccttgttcgattaaggcgtccgaaatatctttattagatagtgttgcatctaaaattggtgagattaaatacaatttattcggtaatggctgttgattatctaaaagagattgtacaaaggataatgccagtgcaccacctgaaccatcacccatgactacgacattttgatgtcctacttcagatactaattgatcataaacacgttgtatcgcttggaaagtatcgtcaatatgaaactctggtgtctttggatagataggcagtacaacctcatataatgtacttaaagtgattttatccaacaatctccaatggaacggtgatggttgtagtgcattgaatccaccgtgaatatataaaattttcttatcaatttgatgtctgaaattaaagcgaaagacttgcatatcatctaatgacaatttttctaaatttgctttaacatttaatgttgaaggctgcttatgtttttttctattttcaatttctcttttataaaaaaatctttcaacatcttgatcatttttaaacataatcgagcgattgtgaagcaaatatttattgacaacgctattcataacacggtttctaatcaatgtcttaacctacctttatatattttatgtatccaatgattgtctatcccctacattctttgccaaaaaaagtatataatgtagaagatattttctttttcactttcaaatttaagactacaattgaacagtgatttttcatcattataacagacaactagacatattgataagtaaagaaaagaactttatacggaggtaccttgcatgacaaatccaaatcaacgattagaaccatttgatgagacatttcaacaaccgaatattcatcgtggtaagcgatatggtaagaaaaaacgttcattggtaagcatgattattcaaatcattgttgttatattaaccgcaatcgctggatacagcatgtggaaacaacccatttttaatattgtcttcaccaaagaatctgtagattttgatggcattaaaaattttaacgagacaattggaaaaatgcatcaattaaatattaatttgggtaatatcaatgatttacaacaaggaatcgatcgcttaattttagtctttaacggtttctttattttatgtatcgttagcctagtcataacaatactgacaattgtatttaatcgcacagttctaaaagtagtaaatattttagtgttaacaattatgttagtcattacattgtatttcagttatattattaaagcactcgcacaagaaattgcagatgttttcaaaaaatattatttaaatgtaccaccagatcaagtgattacagaagctgacgctattcataacggcatcattttacttggctgtagcatcggtttacttgttataagcttattcttccgtaatcgcatgcctcgtttaaaataatgttatatagtagggattgggacagaaatgttattttcacaaaattcatttcgttgacccacttcctgctttttctttattaatgacctactacgtcaatgccaaattttaatataattcctctaacattctataaatcaacaaataaaaaaagtatcgataaccatatttggcaccgatactttaaaaatcatgtccccacaacataatttttgattagtcacacttcaattaatttattttatttattcatgattgatactattatctgcatctaacttttgagctgtagcttttgcttttttattactttgtaaaaataaacataaaattaaggcgatgatgctaaatatcgttgcaactataaatgcatcattaataccttcaaccgttgctagtttatttacaaattgtagtaacactttcattgcgccttcttgtccgccatattgtgatgctaattcacgcatatgatcttgtacaacaggattcgttttatctaactcttccccaaaagctgataagtgttgtgtagtttgtgttgtcattacagtaactaagattgctgtacctatagagcctgctaattgacgcatcgtatttaagaaagcattaccatgagaggcaagtcgtcccggtaacgcattaatagctgcagttaccattggcatcattataaatgccataccaaatgaacgaagtacatagatacccatgattgtcatatatggtgtatccatatttaatttagttaattcccatgttgcataagtcattacagcaataccaaagatagctaatggttttaaaccaatagtatctaacaatttacctgcaaatggtcctagtagacccataattagagaaccaggtaataataacaatccggaatctaatgctgagaatccgcgtaaattttgtaaataaatcggtaataaaatcataccaccatataaacttaacattacaaccatattaataattgttgttaatgtaaatgttgggaatttcaatacttctaaattcaacattggtgatttcattcttaattctctaataacgaatagaataataaagataataccaatcgcaaacattgtttctatctctactgaaccccaacctttgttgccagcttctgagaaaccatataacaaagcaccaaaaccaatcgtactaaaaatgatacctgggatatcagctttagggtttgttgtatattgatataacttaaaccatacaaaaccaattaaaatagcgataatcccgataatgaacataccgtaaaacatcacattccaatggtaattttgtacaatataacctgataatgttggaccaattgcaggtgctaaaatcattgcgatacccattgtacccatggcagcaccacgtttttcaggtggataaattgtaataataacaattgaacctaatggcattagtacacctgcaccaatggcttgtaatacacgtccaaccatcatgattgggaaattcattgaaatcgcacagattaatgaaccaattgtaaagagtactaacgcaactaaaaataattttcgatatgaatatttattaaatagatacgccgtaattggtattaaaataccgtttactaacatgaatcccgtcatcaaccattgccctgttgacgcagaaatattaaattccgtattaatttttggtaaagcaacatttaataatgtttggtttaaaatcgcaataaacataccgaataataatgccgctaatattttaccgcgtgaaacaccttcaccaaaaataaagtttttatgttctttttttattttttcattcactttatattcttctgattcaggatttttagcagcaactgcttcctcatccttattattagtgaatgcttcttgatctttctcagacccctttgtgtaaccatttagactaacttggctatgatcatcttgattgtcaacacgcaactcttcatgcgtcatacgttgtgtcgattgatcagttgttttgtctaaatcactagctttaaatttagattgatttgattgacgtgtcgtaaattgttgttccttttgttggcgtttgcctttttttcttgatcttattaaaaataaattgataaccccaacaataatgagcgctaaaataatgtagctaataatgaaggtcgtagtcatttaatgacccccttaatttttatggatttttacttcagcgttcattccaggaacaacttgtttagacggttctgattctagagtgattttaacaggtattacttgagaaactttagtgtagttaccatcactatttgatgatggcattaatgaaaagcttgcagcagttgcttttccaatactatcaactttacctttaatagaagctttttgaccgtcaatagtcacatcaacatctttacctacttcaacatctttaatatctttttcgtcaatatttgctgttacatataaatcatctaaattgtatgcataagcgattgggttaccagcttgcaccattgaaccttccataccatctaatttggcaattgtacctttttgaggcattttaagatccatatctttcgtttcgccatcttgaccttgtacagtaacaattgctactttgtcacctttatcgagtttgtcaccttgtttaacattaagtgatttaatttgtccagatgcaggacttgctattttaatttgatcgccatttacttttgcattatcagttgttacatagcttgttgttttattccaaaaataaaagccagcaatcccaattgctaacagtacaacaaccgtaatgacattaattaatatcatctttttcatgaaacatttcctcctatttgcttttaaaattcactttatttattatagagacatgataactaaaaaaacaccaacaatttttataagagtgttggttaaaattcacaaaggtgtaacaatatgaaacgacaagccaaaatagaaattcaaaacgcacttgttgatttgatggctgaatatccttttcaagaaatatccactaaaatgatttgcgcgtattgtaatattaatcgttctactttttatgattattacaaagataaatttgatttattggataccatcaactcaaagcataaggaaaaattccaatttcttctaagcgcgctacatcataatttcgaaaatattaaacaggataagcttaaactttataaattcttcattattattgctaagtatatcaagcacaatgagcagtttttcaaagacattttagttacctatccaatgaaaacattattcatagactatataaatttagcgagagattactatcaacaaattatgaatgactatagtactacagtaaccaataaacagctttatgttacatatatcataggcggtcaagctggggtgtttattaattggctttcgaatggttgtaatgaatcacctgaagaagttgctgacattttattggctaatacgattaaacttcaaaactaataatacggtttcattctaataaagaaatgctataaaacaactagataaagttaaaccaaatggatagataatagtacatatgtaacggtgctatcaatataaaaatgccgagatttccacataataatctcggcatttttatttttgatgctaaattcataggtctatgaatagctcaagttttgttttttaatttttcaattcaatataatagaagaaactatgtttatcatcgatttgttttaaataccttcatattataaatctgtaaaataattaatataactgctgtagctataataataattatgtaaggtataggattatcttcaccttttacccccactaatggcgatgcaacaccaccaaataaaaactgtactaaacctaataaacttgatgaactccctctaccactactactttcatccatagctattgtaaaaccaagtgtcgcaacacctgtcactggtgctattaaaatgataaatcctatcgctaaaatccaaaagttccaatgattaagcaatacaatcgtcactaaaattacaccgataatctgaatcatcgtcatgcctctcatcaatttttgtgagtctataaaatcaacaaggtacccagtaagttgacttgatataatgagcgtaataccaattcctgcaaacatccaactaaattgtattgcagtcatgccataaattttttgaataataaacggagacgcagaaatataagtaaataatattacaaatgtcataccttgaatgagcattggtaatacaaaacgtggcgtcttcaataatattttgaagtttttaaacattgtctttaatccactacttgactcacgatttgtcactgttaatgattcaggtacttttaataaagaacctatgaccatgacgaagccaaagatagtcagaatgacaaagaccatacgccagacagaataatttaaaattatgccccctattgttggcgcaacaactggtgcaataccattaacaagcatcaataatgccataaacttagttagttcattaccactatacatatcacttgctatagctcttgaaataactgctgctgcgccacctgtcactccttgaagaaatcttaatgcaaccatcagccaaatattatgtacaaaaacaatacctaaacttgctaatgtaaaaataatcatagctataataagcggctttctgcgcccagttgaatctgaaattggaccagcaaacaaattaccaaacgctaaaccaatcataaacatcgataatgttaattgtgcgttagacgtcgttgtttgaaaatcatgtctaatatctggtaatccaggcaaaaacatatctatcgataatgctccaatggccgtcaaagatcctaaaataataataaatatcggtgaacgcttgttaaaatgcgttaaatcattcatatgactatctcctttatataatgattagtttataactatcacgaacagaaactaaatttaaatatgctcttttatatattagcattagtcacaagtttcatgaacatcattacaacttataaaaggtataaaatgatataaacctcagcacttcataaatttttccacaaaaaacaatcccttcaaagtaattcacactaattgtaaatactttgaaaggatgttgtttgtattccatgacacatgcatcttatttaagttttatactctatttttctgatgtcttgattaattgcaagcggtcttgcgagccttgttcaagctcatattctttatctacttgcttaccgttttcatttattaatcttacggttgcggtaatcttatcaccatgtttttcagcatctataatttgtggtgaactaatcatcattaaacttcctttagatacacgcttctttacatcaacataaaaagatgatcctttttttatatatgacgatacaaaatcaaaatctgactgattaaacgcagcattattcgctaaagaatatccagcaaagaattctatcaatttgttcttcaagctgttttcttctttttctttcttttcaacatagtcttcgatatcttcactgtcaaaattcaaagttatttctgtattgtattttaaatcgctggctttaatcgtcttcgtctgtgttgtaaatgttttacctttcgctttacctgaagctgaaatggtaatatctttattttgtggatatggaccatacgttttggaacttgaaaatgccatttcacggtcatttatagttacttttttagaactatcatttaattttgtatcgccttttaaagttacagttatatttgcttcttcaaaatcttcagtaacatctaccgtttcagaattactttgtctaaaatcaaattttaaatagcctgcaaaatcaccgttctcagttgatttcatagctggaattctatatgtccccggtataaaattacctattggtgtcactttatttgcttcagctataaccatctttttcttaccaccagatttaaactcatattttgttttttctttcggtttaacaattggttgcttggtaggtgcagtaaagctcatattatcgaaaaagatataacgcgtgccatttttacttacacgtaatatattttgaccagatctggtttgaatataagaagctacgctggtcttactcttattcaatttatgtaccgtatttttaaggtcgctgacaaattgcttaagcccaacttcatctttgatatagttaatgtatactttcgcttcttcagaatctactttattatctttagtacttaataatgttgctactttttgtttatcattattctcaatcgcattcactaatattttagtttgcgcttcaggtgaattgaagtttcttagtaaaaagaacaatataataattaagattaaaatgaaaaaaccaattgcccaaggcaccatttttctcatcttgatgttattagtttgtatatcttcatcggttgactttctatataatgcttgacgactatcaaatttatgtccacattgtgtacatatctgtacatcatcttgtgcttgttgtccgcacttcgggcaagatttcatactttcacctcaattctgttcctcttcaattgttatatgtatatcacaaaaattatttcattattttaccattattattttacaaatattatcccaagaatacaattcaagaaatgattaactttactttagaattgtaccttattacattatttatgaaagtactctctcaattataactaaaaagaaggtgttcaatacatacatatttagtcttatatttgaacaccttcaaaaacctatttatgattgctatatgttttaatgcgatgattgatgacttctaatacttgccttacattttcaatatcttcagaatttaaatcattagtaatatcttgcgcaatatctgtcataatcgcattacgttctttcaaatatgctctacctttgtcagttaaggttatgaatttcaaacgttgatcaatatttaaatttggtttatctaacttaactaatttagcatcgattaactttttaattcgtcggcttactgcggccttatttacaccttgtctttgcgtgatttcactaattgtcaaaggttctttatttaacatacctaatacgttagactgctctaatgaaatttcatattcattttgtaaatctttcaacatttttgcagttaatgcgttaacgttatttataaactgctctaaaaattgaatatggtcttgtaaatgttttaccataattatttctccctaattactatttttataaagtatcctcagcaatcattgtatcgcacatctaaaaaacacaaaaatattgacccatatataatataacaaattaagacttacatgttgctgcgttctccttgctttaataaattaaatcatctacatttatatttaatatttattataagcgaggtgtcagtatgttattgaatttattattaatatttatacttatcgttatttgtccgttaattttcaactatactctgacgttaaatttaacatgctacatcttagttgtcatatcgatatttttgtcactcatctatagcatcatgacctatactttcccttggtctatgtttgtaacatttataataatcagtattatcatgctattcaaacatagatatttattttctcatacttctagtcgcttatttattaaaaaattattatctttttcatataaatttgtactctacacatcagcacttttatttataagtacgattcagtcacctattgtgaaaggtttgtctatgtggttagctatattatgtctttccctgttactaacctttatttgttatctcgtttggacagtatcatatagacatagatcatacaacaaagaagttgatatcataattgtgttaggtgctggtatttttaccgaatttgtcacaccaatgcttgcagcgcgtttagaccgtgcacttgatatctatcaacaacaagcatcagcaacaaagattattgtatctggcggacaaggaccagacgaaccaatttctgaagctttagctatgcaacgttatttgattgcacatggtgttgataaaacagatatactaatggaatctcactctataaatacatacacaaactttttatattctaaacaaatcatcaacaatttgtatcatgaagcagttaaaattgtttgtgtaacaagtcagtttcatgtattgcgcgccttacgactagcccaaaaattaggtttatctatcgatggtgtcggaagtcatacaccatatcactttttcttacatgtgctcattaaagattatctaggcgtaatgtatcagtatagattgttattaacattatattgttcaagtagttggtttatatgtctttacgccgcttttatttataatagttaatccacaaacaaactattattataggttgtttctaatattgcgtcaaactatctttaaatattcgttaatccttgattagacaattgttatattgaaaataaataaactaaagcacgtcatcattttatataatagtgacgcgcttttttgtaaacccaaatcgtattctgttatctaacttttatactactatgtcttaaatcattaacatttagcgtctttacaagccactaatcagttattttgccatcttctaattcaatcactcgatctgcatattcaaataatcttcgatcgtgtgtaatcataataccaatcatttgttgttctttaatttgttgacgtatcatctcaacaacttttgttgctctatcggcatctaaacttgctgtgggctcatctgctaaaatgattttcggattattcataaatgctctcataatcgcaacacgttgcttttcaccgccagataactgatgcggatatacattcaagcgatcttctaacccaatatttttcaaaagttgtattgctcttgttgaactttgttgtttggtcattcccgcttcttggcctacgagtgtcaattgctctatcacttttaaataaggaactaaatgtgaagattgaaaaataaaaccaatatcttccaatcgcaaatcactaggacgatgctgtttatcaaacaatggtgcatcattgtaaagcactgtaccactcgtttgacttaacaatccgcctaatatcgttagcaatgttgttttcccagaaccagaggcaccatttaaaatgacaaattccccttgttccacttcaaaattaataccttttaaaacttttgtttcagacaaaccttctccgaaatttttgacgatatctttaacgactaatgccattattctgcacctccaattgcttcgataggatccactttaaataatttgataaatgatagtgaggcacctaaaatcgctactaatataaatatccccaccattaataaaatattttgcgttgttaagtaaaaaggcatcgttaccggcatcataaatgatagtcctactatgatgatcacagcaatacctaccccaattattgttagtgttaaaatttgtaaaactaacgcactcaataaatgtcttgtcttaataccaattgctttcaaaatgccaatttgtgatattttttgaatcgtcataacatagaaaaatgcacttagaacgattgctgtaatagcaaacaaactaacaatcatcatatttaacggtgcttgctctgcttgataactcgcaatattacctgttaaatctttttcactcacaacttgaacgtcatttattttattaagctcatcacgttgttgttgtgttaaatttttcactggataaaatgccgtattaaccttattcaatgcattaaatccgttatcgttcaatagcacaatggaactatgcgcatacattgtgtcgtttaaaataccagaaactctataactagttgaattatttttaaaatgtaatctatccccgactctaatgttgtctgcagctaacttatcattaatagcgacctcatgagcatttttaggataatcaccttttttaagttgtatgcgttgttgtttaacgtcattcattgtaatcacatcttgttctttattagataatttcaatgtttgaatattcattttatatggttcttgatgaattacctttttaatttgattctgttgcgtatcactaagttgcgatttctcaatttgcggctctttcattttttgaacaacatattcatcattatcaaagtgttcaaataacgaaatattctccctaccaagcccttgagctaaaccactaataaataacaccataatacttaataaaagaatgattaatgtgattaaaatataacgaaatttgtaaaacataatctcttttatcgctaatttcatatcgattcacttctccctatttcttctttagcgtcagtataaggttgaaatatgaactcaatatgaacaattgtttttttacgcaaaaatattttacatgtataataaatgaaaaagataagggagtttatagctatggtgcaatgtcttgttgtcgatgacgatcctcgaatcctaaattatatagctagccatttacaaacagagcacattgatgcatatacacaaccaagtggtgaagctgcattaaaacttttagaaaaacagcgtgtcgatattgcagtggtagatattatgatggatggtatggacggctttcaattatgtaatacattaaaaaatgattatgatataccagttattatgttaacagcgcgggatgcacttagtgacaaagagcgtgcgtttataagcggtactgacgattatgtaaccaaaccctttgaggttaaggaacttatttttagaattcgtgcggtattacgtcgatataatatcaattcaaattcagaaatgactattggcaacttaacgctaaaccaatcctatttggaactccaagtatctaataaaacgatgacgttaccgaacaaggaatttcaattattatttatgcttgcagcacgtcctaagcaaatctttactcgtgaacaaataatagaaaaaatttggggctatgattatgaaggagatgagcgaacagttgacgttcatattaagcgactacgccaaagattaaaaaaattaaatgccacacttacaattgaaacagtaagaggacaaggctataaggtggagaatcatgtttaaaacactctatgctagaattgcgatttattccattacggttattttatttagtgcattaataagttttgtattaacaaatgtttactatcattataatttaaaagcatctaatgacgtgaaaatcatgaagacgcttaaagaagcaagacaatatgaacaatcagctaaaccaacgcacattcaacaatatttcaaacatttagggcaaatgaattaccaaataatgaccgttgatcaaaaaggtcataagacattttatggggagccatttagagaagatactttatcacaaaatgctattaacaacgtattaaataataaagattaccatggtattaaagataaaccattcgcattattcgtaactggatttttcgacaatgtaacagataatactgttggtattaactttaagacaaaagacggttcaatagcagtattcatgcgtccagatattggagaaacatttagcgagtttagaacattcttagccgtcttgttaatgttgttattatttatctcgatttcattagttatcgcatcaacctattcaatcattcgtccagtaaaaaagttaaagctagcgaccgaacgcttaattgatggtgattttgaaacacctatcaaacaaacacgcaaagatgaaattggaacattacagtatcactttaataagatgagagagtcattgggacaagttgatcaaatgaggcagcattttgtacaaaatgtatctcatgaaatcaaaacaccattaacacatattcatcatttattaagcgagttacaacaaacttctgataaaacattaagacaacaatatataaatgatatctataccattacaacgcagctgagcggattaacaactgaattgttgctcttatccgaattagataatcaccaacatttattattcgatgataagattcaagtcaatcaactcattaaagatatcattcgacatgaacaatttgctgctgatgaaaagtcgttaatcattttagctgacctagaatcaatcaatttcctaggaaatcaacgtttgttacatcaagcattgagtaatttattaataaatgctattaagtatacagatgttggtggtgccattgacatcgctttgcaacatagtcacaacaatatcattttcacaataagtaatgatggttcaccaattagtccacaagctgaagcacgtttatttgaacgtttttataaagtgagcaaacatgataatagcaatggtttaggtcttgcaattacaaaatccatcattgaattgcatcatggtacaatccaattcacacaaagtaacgagtatgtaaccacctttactattacactgccaaataattcactttaatctctacctcctgaaaaaacatttctgtttttatttcaggaggtatcttttatattgattagcgctttctagccacttaacatttaatttctaccattcaacaaaatttaaatatatcgatggtcatttatggtttaataattttgaaggaggcattaacctatgatgaaactcaatttatttatcaatgcaaatgagacggaatcttatattgatatacatgcacctaaaatgaatgataacgttcaaagtattattaatgcagtcaatgatttagacaaatcacatacattagtcggatacatagacaaagaaatccatatcattaatgtatcagatgttataacattccaagttattaataaaaatgtaacagccattacaagcaatcaaaaattcaaactaaaattacgactttatgaactagaaaaacagttaccacaacatttcattcgcatttccaaatcagaaatcgtcaacaagtattacattgaaaaattattattagagccaaatggacttatacgtatgtatcttaaagatgcacactacacctattcttctagacgttatttaaaatctataaaggagcgcttatcaatatgaaaaatttgaaaaactcattacttattagcttaatcattggtttgtccctttcactgttctttagtatgttatttgcagacggcaaatattatccactgaacccacaatcaactattggcatattgtattatacgcatttcacagaaactaccgtaatgttgatttctatcattttatggttactcataggcgtcgtctttttccttggagattttatctttaaatacacagattggagcattactaaagcaactataatgcatttcataacaacgtatgtcggattcttgcctttagcaatgcttgccggttggtttccactaacagtgcattatctaatcatattcacaattatcttcattgtggtttatgtattaatttggataattcaattctttaaaaataagaactacgtagacactattaacaagcaactgaaacaattaaaatgattttcattaacaactaaaaaacggtaatgtctatcacattaaaaaagacattaccgtttcatttattatttaacttgtaaatacttagttacttcttcattaattttgtgatataaatcctcatgatctgttaagcgataaccaaatgacggcaccatttctttaatctttggttcccaccctttgaattcatcacgatagcatcgctgtaaaacatcaaacataatatctacagctgttgacgcaccaggtgatgcaccaagtaatgcagctaatgtgccatcatctgacgtaatgacttcggtaccaaattgtaagttacctttagaatcctcagtatccttgattacttggacacgttgccctgctgtaatcacttcccaatcttcatttttagcatttgggaaaaagactcttaaatcatccatacgctcatcattagataacatcaattgtgacactaaatacttcgtaagactcatttctttgatacctgcagataacatcgtcacgatattatttggtttaaccgatttaattaaatccatatgtgaacctgtttttaaaaatttaggtgagaaacctgcaaatggaccaaataacaatgaacgcttgccgtctacaaaacgtgtatctaagtgcggcactgacattggtggcgcacccactgctgcttttccgtacactttagcatgatgacgatcaatcacttcttgatttgtacagcgcaggaataatccacttactgggaaaccaccaatatgttttgattgtttaatcccagtcttttggagtaatggtaaactcgcaccgccagcaccaataaatacaaaatcagattcatatgttgtcgtttcattagtttctaaatctttaactttaactagccatgccccagatttctgtttcttgatgtctaatacattctgcttatattgaattcccacaccacgttgctctaaattttcaaataactttgcagttaacgcaccaaagttaacatctgtaccagtttcatcataagttaaagcaattggttcatcagacttacgaccttcaatcattaacggtacccaagatttcatttcttcttcatcttgcgataatttcattttttcgaataaaacacttttctttaacgttgcaacacgactttttataaaagctacattatcttcgccaatgacaaaactcatgtgtggcaccgcttgaataaagcgatctgggttatctaattgtcctgttttaactaaatatgcccaaaactgttttgaaatttggtactgctcatttatcttaattgctttactacaatcaactgtgccatccttaccttcttttgtatagttcaactcgcaaagtgctgaatgccctgtaccggcattattccatacatttgaactctcttcgccaggttgtgctaatttttcaaacactttaatatttttctcaggtgataattctttaagtaatgttcctaatgttgcactcataataccgccaccaattaagatgacatctgttttgctatgttgtgttgtcataacaaatacagtccccctttttaaaatgaataatggaacgttcgagaaatacgacatattaataccactttaaatcaataagtgtctcaataggttcccatggtgatgctctattactatctactatgtatattaatattttataataacgaaactactttaattatatactttatgtgcgatagcacaaagacaaaaccacaaaccttaacagctatcaaccaatttaatttgattgctgattactcactattcattttaacataaagcgctaccattattataatgtcaaacttctttcattaatgatccataaaaaaaagatgagatgttagaaaacatctcaccttctgtatatttatattttgaaatacgtttttttataataatgacaagatgaaagtccaaatacagatgaatattagtaaacatacactgtatttcaatgtcatttttaataattctgattccttaccaacttgttttactgctgcagttgcaattgcaattgattgtggtgaaatcaattttgccgctacaccaccaactgtattagcagatacaagaagtgaaccacttgttccaatttgttgtgcaacagaagcttgaattggtgcaaataatgagttgttatttacaactgatcctgtcataaacacacctatccaacctaaaattggtgatagaactgggaagacattacctgctttagcaataccttgacccattgctgcacttaaaccaccataagttgtgattttagaaattgctaagatgaaacaaattgtaagaactggtaaccacaactctttaaatgtaacgccgaataatctacctgcatctttaaagttaacctttttagacattaaaattgtaataataatagttaataaaatagctgtacctgtttgtccaataatatttaaagtcaatactaatggtttatgcgtaacttcgctgattgttccaggtaagttgaatttaaatactaatgatgataaagcaccatttggtaagaataagtttttaaagaatggcgcactccaaatcattacaatgactgttaatacaatgaatgggctccatgcatgtaatactgcttttgcagaatgtgcttttgcaggttcaatttcttcatctttattaacacgataaatgtgttttggttggaattttttagaaaatactgctaatgctaacattgttaataacggtggaataatatctgccaattcaggtccactgaatacagttaataatccttgagtaagtgtatatgtgattgaaactactaaaattgctggtaatgtttctttaacacctctaaaaccatcaataataaagataagtaagaatggaataatgaaatttatgattgccaatgttaaagttgctgattgagaaacacctaatactgaaacatctccaggtaatttcaacgtttctacaacacctacagggataccaatcgcaccaaaagcaccagacgctgcatttgcgactaaacataacatcgcagcttttaatggattaaatcctaattgtgttaataaaagtgcacaaattgcaattggtacaccaaatcctgctgcaccttctaaaaatgcgttgaatgcaaatccaataagtaaaacttgaatacgttggtcttgtgaaatatttgtaatactatcttgaattgttaaaaattgtccagattcaacagtaattttgtataacaatactgccatcataacgatatagccaatcggaatgataccttggaagaaaccttcgactactgcaccagaagcgataccaactggcaatttgaaaaatggtattgcaattagtaatgttacaacaagtgttgtaatagctgcataaatacctttcattttaaaaacagttaaacatagtaaaaacagtacaatcggtattgctgcaattaaagacgataataataaattatcaaatgggttaaacgtatttactaacataggctgactcttctttccataaagtagtagtgtaattgcttcattaaaatcatgctctggctatagcattttgttatcgataacattttacagaacagtgagattaatgtgatttttttcacaattaaaatataccattttttcagactattaacaatatcactttcctatttaattgttttatttttcattttaaatctgttcatcaaaatgaattgtacttaatgtaatgaagtaacttatactattcatgaattttacataagaccgtgctaaaataaggaagatactacgatgagaaatggaagttatagcaatgattaaacagataaatgtttctaatatgcaaaagtttgaatctcaattaatgaaagctcagtctgaaggttatacacatgtcgttccatatgccaatgagataatgatttatcaatctatgttagatgcggttcaattatatcctaagtctatcgtggttgattatactgtggatggacaatacaaaaatgattgtcactatttcggtcaatcatcgatcaacattgccgattgggctcaaaacaataattattatcctaacctgatatatgcgattcaacagactcttgatttaatacattattactctgtagaaacgattttcgatttagctttattgacacttctgaaaggtgatttatcaatcgatggtcatgtcgtttttgattttaaagcccctttagcaacaagtgcttcaatatgggaaactattaaaactattgaagattttgatatgatgtctcagttttatttgaataaaatggcttatattgatcatcatcctataccttttcgcaacctttttatcgaggattcagaacaacttaattcgccagataattggttgtattctaccaagtttatgctacctaaatggttatataaaatagcaaagcaacgtgctgataacaaacaattacaaaacttcggcctgtatacgaagcaaccaaacgttttaaaagatcacatcgtttttatcggtgatcatcatcaatatataggtaattcaaaatatttatttacttacttcgttaaacataatccaatgactgcctgttattttgttactgacgatcgtcgcggaccacatttcatatcacctaagtctgaaaaagctgacgaattgattaacagcgcacgcgtagttatagttgaaaatgatatacctgaaacgttacaaccaaacggtactttaattcaattacatcaaggcacaccaataatgcaattatttttagatagtaaagagcctattaaaaatatagaaacacctttttatcgtgctaaaaggtataatcgctggttgcaattcgattatgttatacattctgctgatgatattagccacttttatcaaacggcttttcctagtcaccaagcaaatgtattggcttatggtaatcctaaacaccaatatttactacaaaagcgtaacgaaagtactactcaacaacagtataagaaatcgtttaaaataaatgatcaaaaaccagttttattatacgcacctattggattagagagtgcgcaacaattaccactatcagatgctttattcaaagcctatcatgttgtggttcagggtgttgatgaagcgatcttaccagaagaggcgcttgttgcaccaaagtatcttagtgctcaagacttaattctaatgtctgatgtcgttatcactgattactcaaatataatatttgatgcgatggctatagacaaaacagtagcattatacactccaaatcacagtcaatacattgagtctcaaggtgttaacgaagatatttggcgtcatctatcaaaaatttggtatacagaccgacaattattaattaataatttaatttcccaggcaataccagtgattaaatatccacaaatacaacataaagaacaaccattagaatctatttcacaacttatattgtctaagatgacatctaatcaatagtgtttaaatttctcagtggctgtgaatgaggtttaaaagtactataaaacgtaaactttgatactttaaaatacgcaaaaaacggtaaaccctaattcatattatagagtttaccgttttatttttttaacttgcatcatagttatattaacattattgttggtagtttggatcagtaaccattgcttgtccagtataatcaaccgttacaattgaatattttccatttgcatttgggtctttaaaactaaacacatacttatagttgccattatgttcttcaatagaataatcattatacactttattattactaccaaatttatttgcttcattattagccgcatttaaagctgtttggaaatttggcaattgctgtaaagcttgagttttatttccattaaacggataaatttgacgtgcaaccggcgcggcattttgtccataatatggtgcaacgtaacttgatttttgattattattcgcttggttattacttgattggttattatttgtttggttttggtcattgtttgttgcatttgaattagattgttgctggttatcgtttgcactattatctttattatctttgtttacgtctttactatcatctttattatctttcttatctttagatgaatcatttgtttttttatcttgttgttcagttttcgctttatcatctttttctttattaccgtctttttgttggtcactatcttgaccacatgcagctaaaaataatgataatgctagtaaccctgtaactaatcttttcatacatatctcctcctataattcgatattcattgaataatcttgaaatacatatctaccatgtgtatcttttcatggcttgttaccaaagacgtcaacattaatatgatctgaattatcacaatatccataactacaatctaaggttctttttattataccctaatttttgttcattattatttaatttttgtgaattttatgttttctataactttaattattttactttaacaattcattacgcatttagcatttcaaggtatacacaatatttattactatgatttcattttatctgctgcaaaaacaatcattataactctttttccataattaaatctgtatccgttacatcacctgtttgaaaatgatgttcaccaaccactttaaatccatgacgtttataaaatgcttgagcacgaggattatgctcccaaactcctagccaaattttatgtttattatgttcttgagcaattttttcggctaattctatcaattgtgaacctcttccgccaccttgaaagtctttcaaaaaatatatgcgctgcacttctaaataggtctcccccatttcttcagtttgagcactattaatattcatctttatataaccaacattcgcacaatcttcttgataaaaataatgaaatgaatctacatggttaatctcttgtgtaaatttttctacagtataattgtctttaaaaaattgatcaaaatctttgtcatcatagtaagaaccaaacgtgtcataaaatgttctagttgctaattcaactaattcactagcatcttgttttgaaatttctttgattatcccagccatataaatcctccaataaacagtgatcgaatcaaaatattacttatgttatttttcagccaaaactatttaaaaatacattaacacaaatcaattacaaattgtattgattgtgtgtaacatcaataaatgatacatttattccagtaaaatggccgtattttcaaaagagaaaaagagaggatgtatcgttgtgatagaaacatttaaagcatttgtaattgataaagatgagagcggtaaagtaacaccaactttcaaacaattatcgcctactgatttacctaaaggagatgtgctgattaaagtacattactctggtataaattataaagatgctttagcgactcaagatcataatgcagtcgtaaaatcgtatcctatgattccaggaatagatttagctggaacaattgttgaatccgaagcaccaggatttgagaaaggagaacaagtaattgtaacgagttatgacctaggtgttagccattatggcggttttagtgaatatgcgcgtgtaaaatcagaatggattatcaagcttcctgatactttaacattagaagaatcaatgatatatggcacagctggttatactgccggtttagcaattgaaagacttgaaaaagttggaatgaatattgaagatggtcctgtactcgttcgcggtgcttcaggtggtgtcggtactttagcagtactcatgcttaatgaacttggttataaagttatcgcaagtacaggtaaacaagatgttagcgatcaattacttgaacttggtgccaaagaagttatcgatcgacttcctgttgaagatgatcataaaaagccactcgcatcatcaacttggcaagcttgtgtagaccctgttggtggcgaaggtattaattatgttacaaaacgtttaaatcatagtggatcaattgcagttattggtatgactgccggcaatacttatactaattctgtattccctcacattttaagaggcgtaaacattttaggaattgactcagtatttactgctatgaaattaagacagcgcgtttggcgtcgtctcgcaaaagatttaaagcctgaaaatttacatgagatcaagcaagttattacatttgatgaacttccagaacaacttaacaaagtaattaatcatgaaaataaaggccgcattgttatcgatttcggtgtagataaatagtattcatgaaaaagacatcccgttttgcgagatgtctttttatttttaaaacttaatatacattccacctgaatctggttcggtaggtataaatccaaattttgtatataatttatccgctgggtagtctgcgatcagactaacgtatgcactttcgacagatacacttttaatatacttcataatatgttccataatttgactgccgtaaccttgaccttggtaacttttcaaaactgcaacatcaacaatttgaaaaacagttcctccatcgccaatcactctacccataccaattaaccgatctttatcatacaaggttactgtaaataaggcattaggtaatcctttttcagctgcttcgcgcgtttttggactcatacctgcattaatccttaatgcgcaataatcctcgcaagtcggaatatcatatgtcactttaaccattatttaccccacttttcatcacacaatatatcaacctagtataaatgtttatttacaatagtcttattcgcttctttaaacacttcatgatgacttgaaacataaccctctgcattcgcatctggttggatatatgttttagcaaggttcgctgcatttgcaccatcactaaatgcacttgcaattagatgtgattttgcatcatgataaacaatatctccacacgcatagataccaggtatactagttgtcgtattaccaaatcctttaacacgacaatcatcatgcatatctagctttgaagatgtttcactcaataatgtattacaacgatcaaacccatgactaataatgacatcgtcaaatttaactgtatgcgtatcgccactttcaacatgttccaaaacaacttcacttatatgcgtttcatcatcattgccgaccaagtatttaatacgtgtttttgggcatagtttcacatttaaatctgtcaccaacgttttcatcgcttcatgaccacttacatcttcttttcgataaacaactgtcacgcttttagcaatcttggcaatatcatgcgcccaatctaatgctgtatttcctccacctgatattaatacatctttatctttgaaacgtctgtaactttgtacaacataatgtaaattagttaattgatatctctctacacctttaacatctaattgttttggattaataatacccgcaccaattgcaatgataactgctttcgatgtatatatttctcccgcttctgtttcaacttcgaaatgacgttctgcctttttcctaatatctaccacacgttcattcaaatgaacttccggtttaaaatataatccttgcttaattgtatcttttaaaatttcatgacaaggttttggcgcaatgccgccaatatcccaaataattttttcagggtaaattctcatcttaccccctaattcagattgaacatctatcaatcttacagacatatctcgcaatccagcataaaagcttgcatacaaaccagacggaccgccaccaatgattgtaacgtctttcattatgtgcctcctatgactctctatattcatttctttcattaacgcgctcaaattgataattattatcatttaaagccattatactattaatatttatattgttaaaataaatcgcatagttagccatgaattatcaataactatcccatcacaatataaaaacacacctttcaaagtaagaaacaacaatgttcctttgaaagatgtgtatattttttagttctagttatattattttttaaaagactcatcacgtggttctttaagaattgcttgtcttaaaaggaaaaatagcaacaataaacctgcaagcatacctgtgtgcccaatacctgcaaagcctgcaaatgcttctggagagtatgatttaccagtgacttggaagaatccttttgtcaccatcatacctatagtaacgataacacctatgttatatacatagaagaaccagttaaataagtagtaacttgataatttaaataacttctccaatggtaataatattaaaaacataaacatacctaaaataagtgtatgtgtgtgtacaagtgataattgtgttgtaccagtaaaatcatatgcttttgttagctctctatagaaaaagccactaaataaacctatgatcatataaaaaagaaatgaatataataacctacgcattttgaatcctccctcaccttttcattatatccgattatacctattataacagtgacaaaaaagcgaagatatgacacaactgaatttggtttagcacatagtatgacagctaaaataactttacatcaagcgctatacaaataaaatagctataccatgacgctcgctacaaacgtcttgtatagctattatttctatttattaaattatgacggcacttcagtacgttttgtgctatgttttctaacaatagctgaaactaaacttgatacagcgccaaaaatcataaaccctataaacatccacattgtactatttaattcaatatgatgattcaagtataatagttctcttacacttgttgcatagtgtgtgaatggattccaatcatatacatatttttgataactttcaggcaacatttgtttaggtaacgttacaagttgcatactaaagaacattaaaatgaagaaaattggaactgacttcatacctagccataccataacacctaaaataaggcccacgaaaccaagaatcgcaaatgctacaaaaattgcgatacgatttggatggtcaaaatcaaatccttgaacgccttgcatgaaataaatataaacaaagctacctgcaaatgctgcaacaactgcaaatatcatctgtccaattgaagcaatgatacgatgttgcacgacgatattgttactagttctaaatgcaaagaacaataagatagacgttacgattgaacctatccaaattggcataaacattaggaatggtgcattaccacctgcttggtgatctttaactttattaagtttttcattatccacttttactggattcgtcaaaccattgatgtccgcggcattgactttaacattttgactcgttaatgtttccaaactttgcttcgtaatttgagcattaatattatcacccataccagttaacacagatgatgcaatttgtgaaccttgtaagcttgatccttcacttacaatcgttttaaatttagcctgcttaacctctacttgttgattccccattttttgtttcatttgttgaaccacttgtggcggaatttcacctgaagcaactttttgttgcatttcttcttttttactatccataactactttttgtgttttactcatagcatcttttgaaaagtctttatcaataatagctactccaaagattttttgatctttcaaatctttttcaaggtctttttcactatcaaccttaacccatttaattttattagaatcactatctaataatttatcctctaattttttaccaatgttaacatttttatcttgaatcgttgtacctttatcctcgtttaatataccaattggtaaatcttttggtttaggattatatgcaggataaaaagctaaagaaaagattaccaagataatcatagttgctattggtgcaatccataataatttatttttaaatatattcattttattaattacctccttattagacaatgtgttgaatatttcgcatgttgtctattataatatgtaagtgggaataaacaatacacaatgttcatcaatacgtttattaatagacaaatacacccacattgttcaataacacaaggaggttgatttatttttgaaagaagataggcgaattagaaagacaaagtcctccattaaacaagcattcactaaattactacaagaaaaagatttagaaaagattaccattcgtgacataacaacacgcgccgatatcaatagagggacattttacttacattacgaggataaatatatgttactcgcagatatggaagatgagtatatttcagaactaacgacatatactcaatttgatttgttacgcggttcttcaattgaagacattgcgaatacttttgtaaataatatactcaaaaatattttccagcatattcatgataatttagagttttatcatactattttacaattggaacgcacgagtcaattagaattgaaaatcaacgaacatattaaaaataatatgcaacgttatattagtatcaatcattctatcggaggcattccagagatgtatttttacagttacgtttccggagcaacaatttcaattattaaatactgggtaatggacaaacagcccatttcagttgatgaattagctaaacatgtgcataatattatttttaatggtccattaagaataatggcagaaaaccgtttgcataaatcaaaccttgattcactaacttaagtaatactcgcttttcctaaatcctttagaaaggaactatatatcatgattacttcattcagacattctgaagatatagataaacatattataaaaacaccattagatcatacagcgtcatggattaatgtagtagaaccagaccgagaagaaattgaaaatcttatggaacaatataatatacctgaagactttatacgtgaccctttggactcagaagaaagttcccgtattgaatatgacgaagatactggttactcattaatcattattgatttacctatcgtcaattcaactaatcgtagcgttctatcttttgtaacgattccattaggcattattattggcaacggtattatcgtaacagtttgtgacgctgaaaatgaatttttagaaaatttacctaagcgtgatattaatttaaaatttcacagcagatttgcattagaaattttaactactattgccgaccattataatcgtaacttacgattacttaataaaagtagaattcgtattgagaaagaactaaaaaataacattactaacaaacaacttttcaaattaatggaagttgaaaaaagtttagtatactttttagctgccttaaaaggtaacgatacaattattaaaaagttattccgtttacctgcaattaaacgttttgaagaagatgaagaattactagaagatttaatcattgaaaataaccaagccatcgaaacaacagaattacatcaacgtatcttagaaagtatcacaacatcatacgcttccttattatctaatgatatgaatacaattatgaagacattaacacttttcacggtactattaacgttaccaacgctcgtatttagtttcttcggtatgaatgtgccgttgccaattgatgaccatagttatatatcttggattattgtggtaggtatttcattaattcttgtcgtaattgttagtattttcttatggcgtaaacagaaattataactaaattaaaaggtatgacagcttaaagtttcatcctattgcatttgcaatgactgatactttgattactgtcatacctctttttttattctacaacttctttatttgcttttcttttcgataaaattaaagtaactgttatggcaacgatgaatgatattgtcataccaacaaagtagtgtaaccatcctgcatgtactggattgattgaaataaatccaggcaatccagcagttcctaatgcgattgctttaaccttgaagaaagcaatatatgctgaaccaatacctgatccaacgatagcaccaataaatggatatcttagttttaagttaacaccaaacatagccggttctgtaataccaagtaatgctgaaatacctgcggcagatgccacaccttttaactttttattttgtttaataataaagaacgctgcaattgctgcaccaccttgtgcaacattagacattgtcgcaatcgggaatataaatgatccacccgttttagtggcatctgcaattaatgtcgtttctacagctataaagctatgatgcatacctgtaataacaatcggagcatacaataatccgaatattaatccaccaattgcaccaccaaattcataaagccatgttaaaccatctgataaccagtaacctaattgtcgagtgattggacctacaaatgaaaatgttagaaatgctgttataaaaatagataacaatggtgttaacaaattatctaacaccgttggaataactttgcgtaaccctttttcaattgaggctaagatataagctgctacaagcataggtaacacttgtccttgataacctacttgattaatatgcaaaccaaatacatcccaatatgaaatagccttacctgcttcaactgcttttgggaaatcgtatgcgctcattagcgatggatgaaccaatatcatacctaatgcagcacctaaaaacggattgccaccaaatcgttttgctgcactaaatccaattaaaattggtaataatgtaaatggtgcattcgcaaaaacatttatcatttcagctaatccagcaaattgactatatacatctatcaatgatttacctgaaaagaataaatctttcgcagtcaaaatgttatttaaccccattaataaaccaccagcaacgatggctggtataatcggaacaaagatatctgaaagcatttttacaaatcgctgtaacggattcatatttttagcagattgtgctttgacttccgaagtagttgatgcttcttttccagttaatttttccagttcactaaatactttattgacagtaccagacccaataataatttggtattgtcccccagtagaaaatgtccctttaactacatccatattgtttagcgcctcttcatttactaaactttcatcatttaaaactaatcgtagtctcgttgcacaatgcgccattgcatctaaattctcttctccgcctatcgcgttcaaaatttcttctgcggattgcttataattcatatatttagcctcctaattagaaccggttccatttattccactttattgtaaccggttccaaaaatatttgcaacactctattatcattttatataaacacctacaacatttttgatagcgcattcatttttattgctatactatatgcatgtatattaacattaattatcggaggtaattttatgaaagaacgtggccatatcgaacagctttggcgtgaggaaaaatatcatgtattgttacacagtcaacagtcttatcaaatgataaggaatgctttaaaaacggatttatcacttcatcaagtccaacaaatgattgatgatgctttgttaattgaaccgagtataggaagtgtatgtaatgcttttgatcatatgtggggatattttaaaaaatgtgcgaatgaagaagaaagaaaacaatcaaaactacttaaagctgattttattaatagtaaaatcgacacccaaactttattagattttttagcagaacttgctaataaatatgatgttcaatatttactacaaagtcgtgttttaaacacaaaaagaaagagatagattgaaactttagttgtaacggacaaatagtagtcattggagttcagcaattcatactttgtactaaagtttactataatctatctctcaaggtttaaatgtacatatctatattaaaatgcgtttcatgatgttagaagataccatacacatttaattagttacagcataaatcaatttatacccttaattattacattgtttatattttaaattcgggggagtaattttaagtaatatcttgttgctgctaattctattgttaataaattgatattagatgtagaaattgagtgtgaaagttaataatagatgatttagctagtaacataattaattcatatatagtcaaaaagttctgttagatactgttcttgatgaatattctttgatgttaggtgttagctattctagatgagtttcttagatgtggatgcctgtcttgatgaagttatctatgatgttaatataatacttgatgttgattcttagatgttagtgcgatttcaagatgctgattctttgttgttgcactatcttggtgacgtttctagttgtttatagttatcgcatctcttgatgtaaaatctaagatgtttatgcatttctagatattaattcttcgctgcttaagaattatcttgatggtaaatctagttgtgccatgcattttctcatgatgaatctaaggtgttaattcattgatgtgtgctgtttcttgttgcttcattatcttgatggtgaatttcgttgtctaatgcactttttcaaatgattattctaattgttacggcaataactagatggattttcttagatgttcacttttctagatgtttatacttatcttgatgttttctaaacagaacttttaaacgctttattttttagtagattgtttaaaatttcttagttgatggttattgttgttgatttgaataatttgtagcgaatattttgtaacagggctactaagaatttttataacaagaagtgatttcaatcgtactaattttcagcgtttgatgacaaaagtgtatgtccaaacttaaataatggcgataaaatttaagtcatgggtacatttaatgttttttgattcaaacttccattttggtcaatttgctttttttataacatagttgaatatcaataaaagattagcaagttagttcaaaatggctatgtattgttttttgaaatacataggtttgaaatctatattaattatgcaccaaataatttaattagactctatcgaaaatttccaaattttgcttactatctttctaattttacttttatattgtgcacaatgcataaaaacaagcgttttcctaggagttttcattaatttcttttatttttcactattaccttttcaaaaatattcaactataataggtatactatccatgattttaaaaatttccatgttttacatttaaatgatagatttcaatatatattaggcaggagagagaaatatgacatgccaacttaaaatacatcatacattatcgacaatacccagtcgtaatattaataatattatggtgctattttcacttacaagtaaactcaatattacgattaatggtgaaaccaaagacgtaagtaattatattatcttaattaaccatggtgatatttataatattaaccacggcgaaaatataatcgaattaatgatacccgttttttatttttatcaacaagatgatgatttctttaatggttatttagatcgtcatttattacaatcaagtaattatattaagtcattaattgccgatttaatcagtacaccaacaagttcttctttaatggggaaaaatataggtcaaagtattatagacactttacttaaagaagcttttataagaatagatcatgaatatttaccaaatattgctttaagcaatccggtgttcatagactgtgtaaactatattcatgacaatattgatgcgcacttgtctttaaaagatatagcgatgcattgcaacatctctgaatcatattgttctaatctttttgttcgatatttgagtatgaattttaaagattattttacaagtattaaacttgttaacgccatcaatttattactttctacaaaacattctattacaactgtttctgaattggccggttttaacagtcatacaaattttgcaaatcaatttaagaattacttgcattttagtcctaaacagttccgttcactcgtttccaagattactgaaccaccacaaatacacttccaacaagataacgtatcacaattcactgagttaatttcaacaattgatttaacagctcaactggctacaaatacaacagatattcatatagatgattttaatccaaaagatcgaagtcagcgtgccaaagtatttgttcgatttagtaatttcaatgaactatttcaatttattttcaatgaatattacgatattaactttgagcacttaccaaaacctgtcgttttcattgacgatattcacgatattgagattagccaaacgaattacaacctgttaaatagatgttttgaaaagcttttcgaaaaaaatataggtttagcaatcgctattaaatcaacacaacaattcgaaacgatgaagcaattaatactaacatttttacaaggcaatcaagactataagacaagcaagaaattagttaaatttatgctcgtattttgctctaattctatgacagcagaagaaattcatttatgtcatcttaaaattaaaaacaaaaataaagaaattaaatatagtgtgacagtcgatggctttttagaaacttattcaaccgtggaacaagtttatgatgtcatgcagcgtcttaaattccattattactttattgatattgaaaattcaaaaactgcaacacatcttatcactaaaaaccaacactatcatcaaactgacactcattttgaacagtataagaaatttattttagattcaggtatatcatcaacacaatttgtatataataacctgtctgtaagcggatttaaatatactaatgatggtaagaatccaattcaattatctgacatagtgtatcacttaatcgcattattacgatatggcggtggcattagctatcaattattagatgaccattcaaattatatttccttgtacaacaaatatggtagccccctaccattaatgcatttatataaaatgtttagaccttttgttaatgaagatattgaaattacaaataattatgtattgagtcgtaaagataataactaccatttcttattattcaataaaattaatgatcgatatatgtcagacgtaaaacaagatttcattttccataatgaattacctcaagactctttgatgattattaaaacattgaatcatgaacatggttcaattcaacatttgcttccaataagcgatcaacttgtttatatagaaaaagaaattttagatgaattagacaaaacgaattaccctaaaacggagcttgcagttcaagaagaaactggtcgtacatttgaactcaagttaaatcacgacgaggttaaatatatttgctttaaaccaagctaaatactaacagtcctcttgtgtttagtttcttacgttaaaggctatttatatcataaggagatgatatgtaatgagtaactcacaagcaattcaagcaattgaaaacgtgttagcaacgtcaaaagttggtgtattatcaactgcatataataacaaacctaatagtagatatatggtcttttataatgatggtcttactttatatactaaaacgaatatccattctgctaaggtcaaagaaattaaagataatccagcagcatatgttttgttaggctacaatgatacgacaactcgcagtttcgttgaaatggaagccacgatagaagtagttactgatcaaaaagtaatcgattggttatgggagactcaagataaaagctttttcagttcaaaagaagatccagaactttgtgttttaaaggtgacaccacaatctgttaaattgatgaatgacaaatcattagatacacctatcaaaatcgatttataacacaaagtgtatataggaaataacttttatgaattctagatataacaatgttaaatacttaaaataactcgctataattaaagtgtttaatatgtttacaattcaatttgcaatgtattgttttttagacacactttattcacatttaacgtgattagggtgtgtctttttaaattaattttatgtaatataaatactgcatttgcaaactgttgcacttttaggtataacagaattaactacatttaaggagattgatgaaccatgaaaaagaaaaaaggttttggtcttggtattagtttaatcgccatcatgttaattgtatgtattgtattagtaatcatgatgatgactggcggaaagaaagatacatattatggaattatgaaagacaatgctacaattgaaaaaatgattagtgaaaaagatgaaagcattgagaagaacgttaaattaccttcagatgcagatgttaaagttaaaaaaggtgattttgtaattgtttataaattagcagattcagataaaattgttaaagtaaaaaaagttgatcatgacgatgtaccacatggtttaatgatgaaaattcatgacatgggcaaaatgcacatgaaacactaattgtaatttaaattacaaattttagttgccatcaaggtatatacgagtaaaagcagcggtaagttgatttccaatttggaatcattttactgctgctttttatatttgaaatactttcatattgaatagctccacttgccgttcgcctgcgctttagcgcatgcataaaagcccctaacaaccagaggtcacttcgcttcggttcgcctgcgcttttgcgcatgcataaaagcccctaacaaccaaaggttgtaaggggctttaaatgtcagatagtattttttaaattgattttaaatattcttgaccttttgctttgtcatatacgttttcccatttagctataacgattgttgataatgcgttaccaataacgtttacacatgtacgtaccatatctaagatacggtcaacaccaataattaatgctaaaccttgtgccggtaagcccatggcacctaatgttgttaataaaacaacgattgaagttcctggtactgccgccatacctttagacgtaatcattaatgttaacatcaacacaatttgctctgataatgttaagtgcattccatacatctgtgcaacgaataatgctgcaatagattgataaagtgctgatccgtctaagttaaacgtataaccaattggtataacaaaagaagtaatttcttttggagaaccgaagttttccattttcttcatcattacaggaagtacagcttccgaacttgatgtagaaaatgctaaaagcaattcacttttcaagattctaataatattcatgatattaataccacacatccatgcaactagtcctagtatagcgaatacaaagaacaccattgcaaagacaacaactaatactaattttaatagtggtaataatgcggatgcaccaaatgtaataattgtagtacaaatgaatgcaaacactccaagtggtgctaattttaaaattttattaatcatccagaacacagcttcaagcgatccgcttaaaaattctttaactggttctgcttttttacctacagcagctaatcctaatccaaagaatactgcgaagaagataataggtaataattcacccttatttaaagcttcaaaaaagtttgtcggaataatatgtacaatggtatcaataaaatgatttccatatgtagattgttctgctgcatgtgcagttgattgatatttagaaatatcacctttaggtaattttgttgggtctaatccagcacctggtttaaataggttaccgaagataatccctaaacctattgcgattgttgtaataatttcaaagtataaaattgttttccagccataacgccctacagttttcgattccccaacgttcgaaatagaaagcgctagtgagcaaaatacaactggtataacgatcattttaattaaatttaaaaatacgtcaccaaatggtttaatgtaatttgctacgttttcttgtccatataataaaagtcctacgacaacacctaacactaatgcaataacaacttgcataggtaggctaatttttctcttgaatagagccatagtacaaactccccttcatctgacatcactcaattatatcagaaaattgataattatctataaaaaattaaaatatttatcttttatagatgtcaaaaatcactaatttccatacaaaaactgtttacctcaaataattaaaattgaaggcactaaactgtttcaccagtttaacgtttcactattttgatggtttataattttgattgaaatatttatgctttgcagttttcaaacttttcttagtctctgtatcaaagccttcaacaaataatcctttattagtactgattggttggacaacataagttacaccaggttcatctttaaacgtaacttccttatagaagagaccttttttagcactatactctgttttttctgatttaattttatcttttagatttttctcttccaagtaactgtcaattagttgaatattcttatggccttgatatgttttcagaccaaagaaaaatgctactgcaacaattaatgaaataaataatataatgataactttaatcgcgttttttttcttcttcattatgtaactcctttttgcttatctattcagtatgaacgaatcaatttatttaataaagagtttttaccagattgtaacaaatttttttattctcaatattattatagaaatcgaattacatacacgatgcttttaaaaaatttaataacaaatttcattttactatctatcaaaataattgactacttttaacaattaaggatgatacaattacatttttttcaatttaaaaaatcagtcatatcagtaattaccgatgaaaatactaagatatcgatatgttttgcattatttaacatttaaattcaattatagacaattcaataattgcgatgaaatcagtacttgacaactattacacttcataatattgtttattttaacaaggagtgattggatgtatgtagaaaacagctatcttagcaaacagttgtgttttttattttatgtttcttcaaaagaaataattaaaaaatacacaaactatcttaaggaatatgatttaacctatactggttacattgttttaatggcgattgaaaatgatgaaaaacttaacatcaaaaaattaggtgaacgtgtattcttagattctggaacactgacaccattactaaagaaattagaaaagaaagattacgttgttcgaacacgtgaagagaaagatgaaagaaacctacaaatttctctaacagaacaaggtaaagcaataaaaagccctcttgctgaaatttctgttaaggtctttaatgaattcaacatttcagaacgagaagcatcagatataattaataatttgcggaattttgtttctaaaaattttgactattccgacaaaaaataactccctatcataaggtgatgggcagaagtatgcatcgatatgtttattcattatctttattgcttgtataaatctcgatgctcagttcttttgccctgattccttatcaggcacaaatctacccatttataacttttttatctccccttttactttatcttttttaatactactcatataatggctttgtaatacaaatttatataatggaagtgatgatattgaacttcaatcaattcgagaatcaaaacttttttaacggtaatccaagtgatacatttaaagatttaggtaaacaagtatttaattacttttcaacaccttcatttgtaacgaatatatatgaaacagacgaattatattacttagaagctgaactagcaggtgtaaataaagaagatattagtatcgatttcaataataatacgctcactattcaagctactagaagcgcaaaacacaaatctgaacaactcattttagatgagcgtaacttcgaatcattaatgcgtcaatttgattttgaagctgttgataagcaacatattactgctagttttgaaaatgggttattaaccattacattgcctaaaatcaaaccaagcaatgaaagtacttcatcaacatctattccaatttcatagttaaatttaaaatgaatacactactaaagccttaatgtcatgctacgaatattgcgcatgatattaaggctttgtatttaactaaatgaatgtcatgtattacatatcaaccgtttttcaatgagccatattctttttggtataaatgacgcatggtaaataatgcaatacatccaaataccgctaagaaaataaatgctaaatgacttgatcctgttaaattagctacgtacgtgattactagtggtgggaagaatcctcctaaaccacccatcattgatacgataccatttgcggatcccgcttcatttaagaagtatgatggtactaatttgaagattaagccgttaccaatacctgcacaaatacttattgttaaacagcctacagtgaataatgcgatatggtctgaaatacctaaaataatggcaccgataatcataacaacaaaatcaatcatcaatactttaactgcattaaatttatcacctaaaatgccacctattggtcttaagaatgttgccagcgcaatgaatacacctgatcgaataccagcatctactttgtcaattccaaaatgatttactaagtagttaggtaagaaaataccaaatgctacaaaagcaccaaaagtaataaaataccaataacttaagtaatataatttgtagtttttagataatgttttcatttgagccattaatggcactttaattttacgttcttgtgtgtcaccaaaaatgaacataattaatgcaaataaagcgataataattaagtaacttctaacagttgtttgccaaccaataatacccgcaattggcggtgctaaaaatgaagaaactgctgtaccgatatttcccataccataaataccatttgctagacctactttttctttagggaaatatttaggaactgatgtaacaccaactgagaaaattgcaccacctacaccaaggaaaaatcctgacgccattaacatacccggtgtttgtgcttggcttaagaaaaatatcgggaataacaatacgataaaactagtaaagaatacccatttagcaccaacaatgtttgttagataaccaaatggcacacggagcaccgatcccaaaataactggtatcgctaaaatgattgatatttgaccttcagtaacattgacatcttgtttaataaagggcattaatggcgcaattatactccaagccataaacccaaccactaaacttaatgtttgtaatgtaagttgaaagccaccttttgttttgtacatacgtttcaccttcatcaaaatcatttattttttaatagatatcaatactctgcctatatattagaggtcaatgttatttaaaaatgctttcatttatatgaaaacattcaatatagacaaagtattgactacatatatattttattatgattgtgaaaaagtgaacataaggattttcccttatttatgaagtgatttaccctatacaatgtccctttaagatgcttttagacacttattcgccatcattttaatcatattatttaggaacactcacatacttttcaatttcaaacatcctctccattcatcaacctaattcttagtcataactatctgcatatatttaatgataaaacatacaaaagcgccagaagataatcatttcctctcgcgcttttatactgaattatattaatttcaaactctaaaactctaataatttctttttcaatgcatattcaactagctcaggtttactctttaagccaagctttgtcataatatgcgtcttatgtgcttctactgttttcacagatacaaataatttctctgcaatttctttattcccgtaacctttggcaataagtggcaatatttctagttctcgttttgataagattttaaaaggatctgttgtgtttgcagtgtcctgatttgaattagatacaaattcattcactaaagatgttgtaagtttcatatctacatatgtttcacctttatatacagttcgaatagctaacaataattgttcatcaggtgcatttttcaatatgtaacctttcgcaccattacgcaacacatggaacaaatactcctcatcatcaaacattgttaatattagtattttagtttcaggaaaactgtcagcaattttactcgtagcgataagacctgactcacctggtggcatacttaaatccattagtaacacatcaggtttatattccattactttttggtaagcttcgacgccatctgcagccgttgcaacaacttccatatcattttgataatttaaaatcatagagaaccccgtacggacaacagcgtgatcatcggcaatgactattttcaattttattcccccaatgtatgtttcaaattggaatgttcaatgtaacattggtaccctcaccaattttcgtttcaatattgacgctaccgctgactaactcagctcgctcattcattccatataaaccgagtccagaacctttaggcttagaacttggatcaaaaccatttcccgcatctatcacttctgctaccaaatggcgcccagtttgacggatacctacatttatttcatttacatcagcgtatttcaacgcatttagaatagcttcttgcactactcgataaacaaccgtttcaatatcactatcaaagcgagtatttttaatatttgatgtatatatgatttttattccataattttcttcaaactgtttaaaatatgatttaaaagctgcttcaaggcctagatcatccaaagaagcgggtcttaattcaaccgacatattacgtatatcatcaattaatttagcgacaatatattcaatattttctgcgtcttccaaaagcttagttgtatcttcttgatattttaataatctcaattgaacatctacattgagcatttcttgaatcacactatcatgtaactctctagaaattcgctttctttcattttcttgggctgagattgttttacgcatcatacgttgttgatgtaatttctcttgctgttcaatttgtgatgaaacattttgaagcgtaaatgcatgaattcccctgtcttgatcaatcaactgatatgttgctgtaaatggcatcactttttgatctttcgtcttcataaatacttggaaattcgtagcttgtacttgcatcgattctaagaaacagtctttacatgattgcacatcataggcatttgtatacccttcacatctgtgacaaatcgcattcgccacagcactgtaattatcttcttcagataatatatctttagcagcatcattcattgcaataattttaccgttatcatcagcaaaaactatcttttcgattgaatgctcataatattttttcaataaagtatctaactgtatactgtcctcattaatcatgacttacaccctaattcatctcattatttatcatcattgaaaataccaaacttacgttgaatatcatcattatcaaatatttttggtaaaggacgaccatctctttgaccaaataatagtacgccatacacttgattcttataccaaagcggcactgctaaaactgctgttaatgattcgcttaataaaattggatagtcaatcttttcttcaggccctaaagctaaaccaacattggctattaccatacgctttcctgttttcataacagttccagctaatccacgaccttttcttaaaataatcaatttaaatcgattatttttattacctgaaacatagtgccattttattggagatgatggtttgttagattcatagaaagcgattgccgcaaaatcataaccctcttctttgcgtattttatctaatgtctcttgaaatctacgatcttcaattattgcttctggtgtcaaatcctttcacctcttatacttacactttattcttacggtaaataatatatctgcgatttatatatgtcaaaggtacactccaaacatgtactaaacgtgtgaatggccaacaagccataatagtgaaacctaataatatatgaattttaaatgcaattggtacaccactcattaatgatgcatctggtttcaacataaataattgtctaaaccaaattgataatgaagttctatagttaaaatctggatgctgtacgtttgttactaatgttgcataacatcccataaatacaataagtaataataagaagttaacaaagatatcggacgctgaacttaatctgcgaatacttttcgtagtaacacgtctcgctgttaataaaaacatccctaccaatgtaattataccaaagatactccctatataaacagcaccaatatgatataaatgctcagacacaccggcagcatccatccatgatttcggtattaataatcctacaacatgtccaaaaaataccggaataatacctaagtgaaataataaactaccccacatcaatctttttctttcaattaattcactagattttgctgtccacgaaaatttatcataacgataacgtgcaatatgacctgcgacaaagacaactaaacataaatacggaaatataacccataaaaactgattaagcatgatgtttcactccttttggtgatgtcaaacataatttcaatgtttttctaagtgcttgaatcacataggcatatggattgttatcttcaccaagtacattcgccatcacatatgttccatcctcaataatcataatgattaattgaatattctcttcagctcttggatcatttcgccattctgccacttgcaaaaattgaagcatcaacggtagataatcagaaagttcattatctaccatttctagtccaaacatttcatataatacctttaatttagctaacatttgaccacgttctttttgcgtatcaaatttgttatacgtcatatataatggcgcttttttcgtaaaatcaaatgtatctgtataaatcgctttgatttctgataatgaaaatgtcatcattacatttctaaatgctactaaatcttcatatgctggatgatctgtcgaaattgtttcttcaaaagtttttggatgaaaagttaatttttctggaaaacataactgttgtgccatatatccaaaactttcttgatattttttaaaattatcgaaattaatcacggaaaatccctccatagaaattctcattataaatttcttgaccagttttccctgaacctactgcaacaccacagccttcacagttatctccaaaatgctcgccgccataattgtatcctgtactaccttgtgcgtgatacgtatctaaataggtttctttgtgtgatgttggaataacaaatcgatcttcatatttagctagtcctaataaacgatacatgtctttagtttggcgctcggttatacctaatcgctctaatcgagacgtgtcaaatggctgttgagtaacttgagatctcatataacttctcatcattgccatacgttgtagggctccttttactggctctgtatctcctgcagtgaaaatattagctaagtattcaataggtaaacgcatttcttcaatggctgggaaaatcgcatctggattttgagttgtatttttaccttcaaaatagctcataattgggctaagtggtgggcaataccaaaccatcggcatcgttctaaattcaggatgtaacggaaatgcaagtttatattcaattgctaacttataaattggagagttttgtgcagcttcaatccaatcgtaaccaataccatctttttcagcttgagcaatgacttcttcgtcaaatgggtttaagaatatatctaattgtttttcatataaatctttctcgtctactgctgaagctgcttcatgaactcgatctgcatcatataataaaacacctaagtaacgcatacgtcctgtacaagtttcagagcataccgtaggcatacccgcctcgattctcgggaaacagaaagtacacttttcagctttgttcgttttccaattgaagtaaactttcttatatggacaacctgtcatacagtaacgccatccacgacatgcgtcttggtcaactaatacaatgccatcttcatcacgtttatacatagcacctgaaggacacgatgcaacgcaacttggattcaagcaatgttcacataaacgtggtaaatacatcataaaagtttcgtcaaattggaatttaatatcttcttctattttttggatgttaggatcttttggacctgtaacatgaccacctgctaagtcatcttcccagttaggtccccattcaatttcaatgttatcccctgtaatttctgaatacgctctagcaactggcgaatgcttccctgatttcgcagttgttaaatgttcataattatagttccatggttcataataatcttttattaatggcatatctgggttataaaaaattttacctaaagcaatttttgaaattctacttccagattttaattcaagtttccctttacgatttagtacccaaccacctttgtagtgttcttggtcttcccaacgtttcggataccctacacctggcttcgtttctacgttgttgaaccacatgtactcagcacctggacgatttgtccaagtgtttttacatgtcacactacacgtatggcatcctatgcatttatctaaatttaataccatcgcaacttgcgctttaatcttcaagccaattaacctccttcatctttctaactgctacatataaatccctttggttcccaattggtccataataattaaagtgataactaatttgtgcgtatcctccgactagttgtgttggtttcaaatggattctagtcggcgcgttgtgtgaaccaccacgtgtatctgtaatttctgacccaggcgtttgaatatgtttatcttgtgcatgatacataaacattgtacctttaggcatacgatgcgaaataactgctcttgccgttacaacaccattacggttatacacttctagccaatcattatcttggatatcgtgtttttcagcatcttcatttgatatccaaaccgttggaccacctctaaatagtgtcaacatatgcttattatcttgatacattgagtgtatattccattttccatgaggcgttaaataacgcagtaccaaagcatctgtaccacctttaattttcttatctctattcccaaataccattggcggcaatgtcggtttatatactggtaagctctccccaaattgttggaaaacttcgtgatccacataataactttgacgtcctgttaatgttctaaaaggtactagacgttctatattcgttgtaaatggtgaatatcgtcgaccttgtttatttgaacctgggaatactgctgtcggtattacttctcgtggttgtgaagttatatttaaaaacgaaattttctcagctgcacgttcgctagaaatatcttttaacggcattccagtttgttcttcgagatcttcatatgatttttgtgataatttaccattcgtagcagatgaaatacttagtattgcatcagctacattacgtgctgtatcaatacgtggacgattcgctctcacagaatcatcatttgtatcactccacgtacctaacatactttttaattcttcatattgttcactgacaccgaaacttacaccatgtgctccaactttccctttttcaagtacaggaccaagcgtgacatatttgtcgtaaattttagtgtagtcgcgttctacaattgcaaagttaggcattgtacgtccaggtaccgcttcaatttcacccttcgaccaatctttcactacgccgtatggtgttgaaatttcttgctttgtatcatgactaagcggagttgtcacaacatctttaaacgttccaggtaaatagtcttttgccatttctgaaaatgcttttgccaacgttttataaatatcccagtctgaacgcgattcccataatggatcaatagctggattaaaaggatgtacatatggatgcatatctgtagatgacaaatcatgcttctcataccaagtcgctgctggcaaaacaatgtcagaatataaaggtgttgctgtcattctgaaatctaaagaaacgactaaatctaatttccctgttgtttcctcacgccacgtaatttcttctggcttttcattttcatttggtgtagctaataaccctgattttgtgccaagtaaatgcttcataaagtattcttgaccttttgcagaacttgagattagatttgagcgccatataaacagtgatttcggatgattctttttcaaatccggatcttctatcgcaaattgcgtttgttttgacttaacttcatttatcactcgttttaaaattgcttcatttgaatctataccttcatctttagcttcttctgcaaacaacaaactatttttattaaattgtggatatgatggtaaccaaccaagtctagctgctaaaacattataatcagctggatgttgatgctttaactcctctgttttagctaatggagattttaaacgatctacatttgactcttcatatttccattggtctgttgcaaaatagaaccaacttgttccgttttgcaaacgtggtggtccttgccagtctttcgcaaatgcgacagtactccatccttcaatcggacgacatttttcttgtcccacatagtgagcccaaccgccaccattcacaccttgacagccacataacataactaagtttaagattgaacgataaatcgtatctgagttaaaccaatggttaatacccgcacccatgataatcattgaacgcccttcagtatcgatagcgttttgcgcaaattctttcgctacttgaatgacaacactttgttttacgcctgaaatggcttcttgccaagcaggtgtatattttgattctgcatcgtcgtatccttttgattctaatttatgatcaaaacgacgcacgccatattgacttgccattaagtcaaaaattgtagcaatacggactttgtcaccatttgctaaagtgacttgtcgagttggaattggacgattgaatatcccatctccatcactatcaaagtatgggaattgaattgtttctaattcgtatccaccttctgccattgataatgtagggttaattttagaaccatcttctgtttctagttttaagttccacttcttaccttcttcccaacgttgacccattgtgccattaggtactactaaactatcgctgattgcatcatgaataactggcttccattcgccttgctctgttgtttgacctaagtcactcgctcttaaaaatcgacccgctttatatccattttcatcttcgtccagcatgataagaaacggcatatctgtatattgtttagcgtaatttataaagcgttcattaggttgattaacataatgttcttgtaaaataacatgcgtcattccttgtgcaattgcagcatctgaaccaggattcggtgctagccagttatctgcaaatttcacattttctgcgtaatctggtgctactgaaatgacttttgtacctttatagcggacttcagtcataaaatgtgcatccggagtacgtgttaaaggtacattagagccccacataataatgtatgatgcgttataccagtcacttgattcaggcacatctgtttgctctccccaaatttgtggagaggcaggtggtaaatctgcataccagtcataaaaactaagcatttcaccaccaagcaaattgatgaatcgagcacctgctgcataactaatcattgacatcgctggaataggtgtaaatcctgcgattcgatctggaccatatttttttattgtatacagtaattgtgctgcgattatctctgtaacgtctttccaatttgaacgcacgtgccctcccatacctcgggcttgcttatattgtttggctttgtcttcattttcaacaatagacgcccatgcagcaacgcgattaccattgttttcttctaatgcttcagtccataaatcccagagttttccacgaatatatggatatttgattcgaagcggactgtattcataccaagagaatgacgcacctcgtggacatcctctcggttcatattcaggcatatccggaccacaacttggatagtcagtttgttgattttcccaggtaatcacaccatttttcacaaatactttccaagaacatgagcctgtacagttaacaccatgtgttgttcttacttctttatcgtggctccaacgttctctgtacattttttcccattctctacttttactttctaggatcgaccaattcccattaaatttttctgttggcttaaagaaattcaatccaaattttcccatatttatatcctcctacgtataaaaatacgatgtgtagatgtcgtgtttttaaatactttaaaatgcccaagactattgctttaattagattgtacattttttcacaaacataaaatattagggaatcacctaattacttaaggaatttccctatcaataacgggatttcattgaaataatacacaatcatgtatggtcgtgcttattgccaatctaaatcgttcaaatttggcacaacgacaaataaggcttcaacacgaatatattctctcggttgaaaccttacttattcatttattttttataaattagtgacataacactgtattagcatctgcatgatcggttgaaatatatgttacattttcttgctgcttaataaatgcatcatagtaatcatattgcgacgaatgatatgtgccattcgatgtatcatttgggtttagcaaacagccataaccttcgtcatataaatgttcacagagcataagggcgtcatgtttagaaccacttactacataaaattgcttcataggatcatatgatttaggagtgttttcagtataaccaacaacttccccaataatacatatacctggtttcgcctcaattgaatagtgttgcaattttgaaataatattacttaaacgccccttaacaacaaactcgttaaaacacgatgcttgaaagacaatcgctatcgggtaatcaatatctgtgtattgttgtatctgtgtgataattttccctaaacgttttacccccatataaattgctaacgtgccaccattcactaaggaattgacatccacttcattttcttctgaatctttaaagtgacctgtagaaaatgtcacacttttagcaactgtacgcattgtcaaacctgtctgcatagtagcaactgctgcgctcgctgatgtcacccctggtacaatttcaaacgcaatatgatgttcatttagtgtgtcgacttcttcttgcactcgtccaaatattgctgggtcgccacctttaagcctcacaaccttgttatatcgacgtgctgcttccacgatacattcatttattttttcttgctgaatgtgttttgcatacggctttttaccaacatcgataatttcagtagtcaaattcgcatattgtaaaattaacggattcactaatcgatcatatagaatgacatccgcttcacgtattaaacgctcagcctttttagtcaaataattcggattacctgggcccgcacctatcaagtaaaccttgccatattcctctacagacatatatatacgttcccgtctgtaacttctacctcataaacatctacacaaccttcatcaggttcttgaacaatacctgtatttaaatcaattttttgatcgtggagcgggcaaaatacatattccccactcactgtcccttcagacaatggtccttgtttgtgtggacagatattgtgaatcgcatgaattttgccactttctgttaaaaacaatcctacctctttgtctttgacaataaccttttttccaattaggggtgttaattcatctatagttgtcactttaattttttcttttgtttccatgtattacaccttctccacttcaaaaattttacgtgcttgcgcattgctagttattgcttcccaaggttcagcttcgactgcttttttagcatccataatgcgttcaaatagttcattttgtctttctgggtcaagtaagacttcttttacattttcaaatccaagtcttcttaaccatggcgctgttctttcagcatatatacctgtttcgcgataatattgcatcaaagcaccacataatttgattacttcatcttctgtttctacagttgttaaaaattcagctttttcaacttctgtaccaccattaccaccgatatagatttggaatccattttcaactgagataataccaaaatctttaacacctgattcaacacaacttcttgggcagcctgatacacccattttgaatttatgaggtgtatcgatgtattcaaatgttttttctaaacgaatgccaagtcgtgtcgtgtattgcgtaccaaatcgacaaaactctttaccaacacaacttttaactgaacgtgttttcttaccataagctgatgctgaacgcatacctaggtcttcccatatatttggtaattcttcttttttaactccatacaaaccaacacgttgcgaacctgtcactttaactagtggcacatgatatttcttagccacttctcctagacgaatcagttggtctgcatctgtaacacccccacgcatttgaggtataacagaaaatgtaccatcattttgaatattcgcatggtaacgttcgttagcaaatcttgattctctttcatcttcatgatcatgtggataaaccatgtttaaataatagttgattgctggtcgacattttggacatccacctttatttttaaagtttaaaacatgtcgaacttctttagatgtttttaaacctttcgctcttatttgcgttacaatttgatcgcgtgtcaaatcagtacaaccacatataccagcaggttttgcggcaacaaagtcatctcctaaggtgtgctgcaatatttgagcaatttgcggtttacatttaccacatgaattccccgcttttgttttagccgttacttcttcaactgttgtaaagccattttccgtaatcgcatttactatagtacctttatcaacaccattacaaccacaaattgtttcatcatcagccatatcagcaattgatagcgatgcctcttctccacctttagtaagcaatgatacaagtgtgtaatcttcagtggattcaccttttttcatcatgttataaaagcgtgaaccatcatcgatatcaccatatagtactgcaccaactacattaccgtcttttaaaaagatttttttatagttattatcaacactattaaatatttcaatacctttaatttctgcattttctacaatttgaccagcactatacaagtcacacccagaaacttttaatgacgtaaatgttgttgatcccttgtatccgttcgtttctttatttgttaaatgatcagctaatactttaccttgttcatatagtggtgcaacgagtccataaactttgccgttatgttctgcacattcaccaactgcatatacattgctatcacttgtttgcatcacatcattgacaacaataccacgattaacatctagacctgattctttggctacttctgtgtatggtcgaatacctactgccataacaactaagtctgccggaatctcgcgtccatcagccaatttaacaccttcaacatcatcttctcctaagatttcagttgtgttggcttgcatttcaaacttcataccttgcttttctagatctgcttgaagcatatttccagctttacggtctagctgcatttccatcaaccattcagctaaatgtaacaccgttacttccataccttgatctaataaaccacgtgcacactctaaacctagtaagcctccaccaattacaattgctttctttttagtcttagcaatgttcatcatttgttcagtatcatcaatcgttctccaaccaattacactcggtaatgtcgaacctggaactggaatgacgaatgctttagaacctgtcgcaaaaatcaatttatcgtatgatacttcaataccatttgcagtagtaactgattggtttgctctatctacttcaattacaggatcatttgtaattaactcgataccatgttcctcataccactcatatggattcataattgtttcttcaactgtcattttattttgtaaaatatttgaaagcatgatgcggttatagtttggataaggttctttacctattaccgtaatatcatataaatcgttggcgcgctctaatatttcttcgattgttcgaatgcccgccataccgttaccaatcattactagtttttgctttgccataaaatatgcccctttactccataatatttatttcaaaaaaaggtattaatttttcgttagtgcttttatattttcattggaatcattaagctttctaatctatcgttaatgatttgctttaaaattgggtcgaagttaattgaaggtgtgatgtgtatatctgtattaataaccatgtcattcatttgctgcttcactttgttaacaagccttccgtcgtataaaaataatggtacgacaatcaatttttgataccgtttcgagatgctttctaaatcatgtgtaaaactaatctctccatatagcgttctcgcatatgtcggcttgctaatttgcaaattttgagtgcatatttgtaactcttcgtgtgccttagtaaactttccattaatattgccgtgtgcaacaaccataactccaacttgttgttcttcacctgctaatgcgtcacaaatacgttgttcaattaatcgtctcattaaaggatgtgtgccaagtggctcgcttacttctacctttatgtctggataccgtcgtttcatttcatgaacgatattcggtatatccttgagataatgcattgcactaaagattagcaatggtacaattttaaaatggtcaaccccactttgaatcaacgtcgtcattaccgtctctaaatcctgatgctcactttctaaaaacgcaatatcatagtgatgtatatcatcttttactaattcagaaataaatgcttctaacgcttgattctgtcgtccgtgcctcatgccatgtgcaacaatgatattcccattcacatttaccaaccctttcacacgtattgtataccaaatcattttgtttttgtgaaaagaatcacattataatgtaaaatcagggaattccctgatgcctgtagtcatgcatattccttatacattttccctttttgttaaatcaaaaaaagcgaccgatatatgaatccctactcaacatttatttgagcaagcatcaatatatcggtcgcttgtagtgtatattattatcttaaaatggtggttggcctaatattgtttcgtcaaagcgctcgggtatcaatactttgcgcatgatcacacctaaatcgccatcatcattttcatgttcgctgtatatttcataacctcttttttcataaattttaagtaaccacggatgcaatcttgcagatgtacctaaagtaactgccgctgactttaacgtatctcgcaaaaatgcttcttcaacataagtaagtaattggctaccatagcctttcccttcatactcaggatttgtcgcaaaccaccagacaaaaggatagcccgaaatacttttcacacttccccaaggatatctaaccgtaatcgtagatataatttcatcatcaattgtcatgacaaatgtagtatttttatctatattttctttaacagcatctaaattagcattaactgaaggccaatcaatacctagttctcttagaggcgtaaatgcttcatgcatgagttgttgcaatttttctgcatcttgttcacttgcgagtcgaatcatcgtttttgtcatattaatccccactcttttttaaatgatttaaccatattttatttttaaaataaatatccatcaaagtgtatcaataaatttatcacatgtcagaaagtatgcttcatctgaatacaccaatactctcatgaaacttattaaaaattactctctcaacgtaaaaaaccattcaaattcatgaatggtttggaagaatgattcattgttacgctatttaatcactacatcttaattattgttgctctaaacgattacgcttaccatttaagaaagcataaacgagacctacaaaaataccgccaccgacaaagttacctaagaaagcaaaaacgatattttttaaaacgtgtaaccatgaaactgcatcaaggttaaagaataccatacctgcatatagacctgcattgaacacaacgtgctcatatcccatgtatacaaagaccacgacaccacaagctatgaagaatgcctttgttaagccgcctttgaattgcatagagatgaaaataccaatattaataaagaagttacagaaaataccttttgtaaaaatattcaaccatgttgaatcaacagtctttttctgaactaaagctgttaaagcttgtgtcatttcaggtgtcatgacatgcgcaaatttcattaagaaaaataacacaaacccacctaaaatatttcctaagaaacaatataataaaatccaagtcatcttcttaacagaaacgactttataataccagcctactgtaaagtacatgaagttacttgttaataattcagagttagttaatacaactaaaatcaaacctaaactaaacgcaatggctcccattaaattgataagtccatctacgtgagtactcgcaaactgcgtctttattccgaacataaatacagtaacgattgagagtaaaaatccggccatcattgctttaagcatatatcggccaggtgtttgctgtaccattacttgcttcatttgtactgaagatgatattgaatcaacaattgcgcctgttgaatatgtatcttcaactgttttcttattttctatcacagtacttcccccatttactttgatcaaataaaatttactttctaattatattagtaaatcaatgtaattgatagattaaatttcagaaaaatctttttattctctcaaaaatgtagttttctttcataaaaacagcgagataaatcgcgtgattggctaatatctttatgatttaagatattacgacgctcattttatctcgctttatgtaaagtattacttattcttttttaaatttgaaaagtaatgtaaaccatatgcaaatacactgtaaccaattgcagtacgtaaaataaaccttataactttattaggtacacattttgacgttactgaaatagaagatagtagtgttgtgaaaatatataatattaaaactttgatataacgttctaccatcgaatcatccctcatttttataatattacaagattattataaaccgaatgaaacaaaaaagtttttacatattttcaacaactttatttcaataatgcatcaagttgatctaaagtttgattcataccttgttcaacacccatgtttatgacttgttgagcgacttcttttgttggaaataccgatgttgatgtcactgtcgttttcgttgtattgctcttggaaaatgacaaagtaattttcatgcttggcatttttgtatcttttgcaccttgaggtgtcgcaaatgagtcaatatattcaattaaatatggacgcttaaccgttttatattctgctaatgtatagctggtcattgtaggtgttttaatcgcataaaatgcatcaccgcctgaaacagcattaaagcgaaacactttggtactagcgtcttttggatgaaaccatttttcaaataatgcttttgtcgtataggcatcaaacaccttttcaatcggtgcttctatcgttcttgaaaaaataattttattatcttcaactttaatcgtcatcttcccactccctatcttttatatttactcatcttaacatgcattgagtaacatatgttaccaaatcatttgttataaactatagtaatattaatcattccctctgttgaaattgataactacgaaataaaaaacacactctattcagctattaacagttgagtagagtgtgcaaacctgttgaattaatgcgctaacatttcttctttgatttggtctttatttaattttgaaggataatatgttggccagttatccatttcttttaataacgcgtcattatcattacccataaagatatggaagtgttctgcctttttaggtgcaatgttgtgatcgctaaattggatgaatttcggtaagtctttatcattaccatcgaccaatttaaacataaatctcacgccacggttacctttaggatatttcaatgttttcttaccattgtattcatatttaccagtgtgtttcttaccatctttagtaaatgtaatttcatttccttttatatcaatgttagtaatatcagttttatatcctttgtcataataagcttttaaatctttagcagatttcttcggatcattttcagctttatgttccatcacttcatcaagcgtaccgtcttttaagtaagggtaaacagattgccattcaccagcataatcgcttaattcacggtctttaacttgctcatctttaaaatacccatcagaaattgctttgtcatgtttactttcagctttgtcgtctttcactttaacaccactgtctaaagctttaccgatattttcaatattagatttcattaatgattgatacgtaatattatcttttttctgttgttctttatttaaagactccatgttgtagaattttaaaggcttcgcatctgtttctttacgaattgtttcagtcactttattcgcaacattatcttcgtaaagaatatatttagcattgctatctctaatttctttaacaattttagttaattctttttgtgatggatcttcagcattcatgttttgaatacctttttgaacaaaaccataacgatcagctaagtatccaattgattcatgtgaaatgaatactgcattaccttgcttatcttttgtaacttgcttcatatcgttatcaattttcttaagatcgtcgtttaattttttgtagtttttctcatagtcatctttatgttttggatcttttttcactaattcatctttaatttctttagcgaaagtttggttaattttaggatctaaccatacgtgtggatcatatccaccatgatgatgatgttcttctttctcatgatcatgtccctcatgttcatgctcttcaccatgctcgtgttgatcagttaaaagctttgctttatctaatttatcctctaaagacagttttttatctttatctttgatagtagatgcaactttcttagcaaccggatctaaattatcccctgtatacataaacaagtctgacttgcttgcacttaatatatctttttgtgttggttcatagctatgtaaatctgtccctgctggatagattgatgataccttcacgtgttttccaccaatttgctctgcaaatgattgcaatggataaactgtcgttttaattgttaccttgccatctttatcttttccatcatcattcccacatgcggctaatgataaagttacggctggtacaagaagtaacatacctaatttctttttcatagtcaccctcctaaatagtaatctttacgttttaaaattatatactcatgctacttaaaatacaagcactgtttttataaataatataaagtcgaatcatactttaggtatttaccacttttcgttttatctaatacatgactattgtacaaatatgatacagaaaactttatagtatttacgaacgtcataatataagaaaaaaagacaatctctatcatattgctaatagaaattgccttttcatattgtcctaaaataacttaccctatttttatagtgtgacttttagatttaataatggtatttacatgatgctatttttatatgattgtcatctactgtataaaccaatctatgttcgtgattgatacgtctactataatacccagtcagattcgattttaacttttcaggcttacctataccttccaatgcaccatttctgtcaatacttttaagtaactcattaatcttcttcaccatttttttatcgttctgctgaaaatacttataatcttcaaaggcttgaggcgaaaacgtaatatttaacctagccattatacatctatatctttcgttatagttttcccacgttctagatctgcaattgattgagctaagtgttcagcattatttgggttctgttggaggtaaagtgtttccatcatggagttataatctgattctgacatgattactacgtttttatcatcagtagatgttacagttaccatatcactatcatcatttacttttgtcataagtgcctttaaattctgtcgagcgtatgaataatttttaataatcatatttatcgcctccttttaacacacctcaattgtacaaatatctgtacaataaaacaagcgacacagaaaaaaactactaatcaagatttcgcacggggaagaatcaatacctatcctgtactgattccctactaaacaatgtttacatgataatttctacctatttagacttcatacattaaaaagacaatctctatcatatcgctaatagaaattgccttttcatattgtcctaataaattgatatcacttacttatctcaacaattaagactattttattttatcttttaataacttctcataactttcataatcatatggatcttcaactttctcgccattaataaatgcagttggtgtcgtttttatatgattatctttcgctatttttttatctttctctgcagctttccaagacttgctatcttttgtcttgtaatcttttataattttattttccgtctctttatctaaatgcagttgtttaatatgtttatctaatagttcttttgttaaccattctttattttcatcttgctgggcagcaaataattgcttttgaaaatctaaaaatgatttaggtgcatacatcaatactgcatgactcgcacgcgaaccaacaattgagtctttacctaagaaagctaaattgacaaattggtattccactttgtgattatctatataatttttacgcaactttggcatgactttttcatctaattctttacaataaggacatttatagtcgccatatatgacaactaatggtttgccgtttttcgaggatgtcgttgctgattcttttttaccgcaagctgttaaaattaacatgctcactataaataatgttagtaattttttagtcataataactcctgttcatatctagttcgtcatattttcttcatgataatccgcatcatgttgttgataatatcgtctcgaatcaaaatcttgcttatatgatacacgtttatcactaaaatcatatgcataataatgcacttcatcatcattactcaaaggtttataagctaaaatgataattttatccttatcatagacataaatattagcatctttgcgttcaaaatgatcaacacgatcaccgttgccttttttggcaagttgttcttgtttttgattttgaattttaactgcttcatctatttctttcacatatttatcattaccacatcctgatataaagactagtaataataataccgtcgccacaaatcgcttcaatgctcccactcctactatcaacttccaactaactttcaatataattaatactatacaccgtcaaacattaatgcgctacaactactaccaatgcatttaatataaatatccaaagaaataacagttatgtatagtcaaagaaaaatatatttcattttctatgtgtatttgtaatcagtttttgataaaataaaaaaatagcattattaataaattcaaaaattacagttcaattcagagagggatgggataaaatgaactttgtaacgttgacttcggatgagttcaatgcgtttacaacaaagcatttttcacattacacacaatcagctattcattacaatcatagagttgatttaaaaggcgatgtgcatcttgtaggggttaaagatgacaatggtcaagtgattgcaggatgcttattgatagaagcacgcacacttaaatttttcaaatatttttatacacatcgcgggccagtgatggattatacaaatcaatcattagtagcatttttctttaaagcattaacgtcatatttaaagaaacacaattgtttatatgtccttgtagatccatatttaattgaaaatttacgcaatgcagacggtgaaattgttaaatcttatgataaccgagcatttgttagaacaatggataaattaggttataaacaccaaggtttccctgtaggttatgattcaatgagccaaatccgttggctgtcagtgttagatttaaaagataagactgaagaccaacttttaaaagaaatggattatcaaacgagacgtaatattaaaaaaacatatgatattggtgtcaaaactaaaacgttaacgattgatgaaacgcaaacttttttcgacttattccatatggctgaggaaaagcacggtttcaaattccgtgagttaccatactttgaagaaatgcaaaagttatacgatgaccacgccatgttaaagttggcgtatattgatttaaacgagtatttaaaaacgttacaattaaagcaacaacaattaacagctgaactctcaggtgttgaagaagcattggaagaaagtcctaattcaaagaaaaataaaacgaaacgcacacagctagaacaacagctaaatagcaataagcgtaaaatcgacaatacaatagaacaaattgaacaagatggtgcagtcttaaacttagcttctgctttatttatctacaatgagcatgaagtttattacttatctagtggttcaaaccctaaatataatgcttatatgggtgcctaccatttgcagtgggaaatgattaagtttgctaaagcgcatcatattgatcgctataatttttatggtattaccggtgacttttcagagtcatcagaagactatggcgtccaacaattcaaaaaaggttttaacgcacatgtagaagagtatatcggtgactttattaagcctatcaaaccaatgttttacaaaattcagcagtatttaaatcataaacgtcgttaaaatatcgctccaagattatgacaacataacaaagaaccacgcatcatgtatatggcttcatcgccatactaaaacatgatacgtggttctatttgattattcttcatttataacatttaagaaacgtcttaattcttctgttttcggacgattgaacatctcttctggagccccttgttctccgatcatgccttcatgaataaatacaatgttattagatacttctttagcaaaacgcatttcatgtgtcacaatgaccattgtcatgccttcattagccaaatctttaataacctttaaaacatcattcacaagttcaggatcaagtgcagatgttggttcatcaaacaacatcactttagggttcattgctagtgctcttgcaatagcaacacgttgttgttgaccacctgataatgcatgtggacgttgatctttgacatgtgttaaaccaactttctcaagtaactcaagtgatttcccacgtgcctcatcctttttcaactttttaactgtgataagaccttccattacattttctaatgccgtcttatgcggaaaaaggttataactttgaaataccataccagactgtttacgaacttctatttgtgattttttatctttagatgtatatgttttgccgttaacataaactgtaccttcagttggaatttctaatgcattaatcatacgtaacaatgttgttttacctgaaccagatcgaccgattaaggttacaacctcaccttgttcaacagataaatcaatacctttgatgacttcaacatcattaaatgatttatggatattgttcaattgaatcatgagcgataccctctttcaatataagattcatagataccttggataattgaaataataaagcataccacccagtacattagcgcaactaacacataaattgttaaatattcatatgttgtagacgcaacttcttgagcttttctaaacatttcagccactaaaataaatcctaataatgatgtatctttgattaaacttaaaaatgtattacctagtgcaggaatcgacactcgaattgcctgcggtaaaatgatacgttgtatcgtttgaccatacgtcataccgatggaatatgcagcttctgtttgtcctttcggtatagaaataataccgccacgaataatttccgaagcatacgcacctacatttaatgataaaccaataatagcagccactacaggtgccaatgtccattggttgtcagcgtcatttgttaataatctacctaattctggaataccataaaatatgataaatagttgtactatcattggtgttcctcgaataatagatacatagacacgtgaaatacttcttaaaattttactcgttgaaattcgcattaatgctgtaaataatgcaataatcaatcctaaaacaaatgtaactaatgtaataggaattgaatatttgaccaaaccttctagcataggtccgaaagcttgttttgcagcatctagcgcatgttgttgttcgctatttagatttagaaacatcttgaccaaaccatttcttacctattttagctaattcaccgttttcctcgatttttttcaagccatcattgaatttttgaactgtttcatcatctgcttttttagaaaatgcaaatgcagatctactttgttcagcattacctttgattgctttgatcttagcattaggtttttgttttttataatccaagtatgacagactatcattaaatgtaccatcaacacgcttagacaataataaatccattgattggttaaagccatcaacttttgtaatatcagcacctttatccttagctaatttaccataattagatgtgaatgtttgtgctaacttcttacctttaacatcatcaaaatctttaatatctttttcattttcacgaataactaaaacagcacttgagaatgtgtaaggcttagaaaatttatatttcttttctctatcaggatttatacccacttggttcgcgattacatcaaaacgccccgcgtctaaacctgcaaacatagaatcccaagaagtttcattaaatttaagttttaaaccttcttctttagccactgctttaataacatcaatatcgtaaccagttaatttaccatctttatcatggaaactaaatggtgcataagtcccctcagtaccaacattaattgtcttgctatctttattagcttccttgtctttcgacgaattgtttccacatgcagccaatatgaaaacgaaagctatcatcacaaataaaagtcttttcatagaatatatctccttattcttattattctaatcggaataaaaatattttaatctgaaatgccggataagtcaatatgttgaacttttgctaaaaagctttatatagctagcaacttatatttattgacgagaatcaacttcttttttcttcccttgtaacataaatgaacaaaagaaactaacaactgtaatcaataatgcaaataaaaatccagcgtgataaccatgcaacatcgtatcaactttaatttgattcatcatatcaattttgttcatgccattatagtctgacattgttggagaaaagtttttgcttgcatgagataaaatagtaattaatgcagctgttccgatagaaccagcaatttgttgtactgtgtttgtcatagatgaaccgtgtgcattcatttctggctttaattgattcatcgtatgggtcattactggaattaatcctaacgcgataccaaccattcgaatcgcataaactgttgccaacatgattgttgatgtttgttcatccattacaacaaaataagccgtagtaataacaacaatcgccatacctactaaagcaagctttctaggaccaaacttttcatataaagcacccgaagtcatcgacataaatgccataacaattgctcctggtaataaagttaatccagaatctaaagctgaacgatgcaataaattttgcacaaagataggtaaaatcgtttccgaaccaatcatcgataccattgtgacacccataataatgataccaactgtaaattgtttatttttaaatacagcaaaatttaataatggtgttgatagccgatattgacgtaatacaaataatgcgactaaaacaacgcctccaatcatagatactaatacgataggattatcaaaacctttttctgaaattgaactcgttccatacaataacccgccgaaacctagtacagaaaaaatgacagaaataaaatcaataggtactttaattgtagttccaacattttttatcgttttaaatccaattaaaaatgtaacagctgcaattggagcgacaacatggaaaagcgatctccagttaaaatattcaacaaggtaacctgaaagagtaggtccaatagctggtgctaaaccaattaccaaaccaaatatccccatatatttaccgcgttcatgcggttggaaaacatccaagatcgttgtcatcatcaatggcatcataatacctgcgcctaacgcctgaataattctagcaactaataatgttgcaaagtgcggactcaagccgccgagtaatgtacctaagaaaaagatagaaatacccactaaaaacacttgtcttgttgtataacgttgtataacaagcgcggacaaaggaataacaatcccattagtcaataaaaaagctgttgtcagccattgaacttgtgtatatgaaatttcaaagtctttcataatacttggtaaagccgtcactaatagtgtttcatttaataatccaaaaaatccacccatcagcatagtaataatcatcgttaatttttgtttcttcgacatttaaagcttcccccctcaccatctaaaaaacgacactcatttttagatatccggtaattatacccattttcaaaaaaattagcacgactttattacaatttctttaaaacgtaatcattactatttacatatgagtagttatcggtcataatatatttacaaggagggatagagatgaaattagatttacagactgctcgtcgtaatttaaatagccctaacattaaaacaagaaagcgtgctttaaagattattaagcaacataaaagagcgaaataattgttttaatttgactatattgtatgtctaactatattttcgagtatccctagctcgttaatataaactctatacttaactatttccttacattacttcacatatttaagagctgcatatacactcactccttgtgtacatgcagctctttttttataagtagtatttatctataacttctaaatcatccgttaattcataaacaagcggtgcacctgttttaatttcataattaatgatatcttcatctgacacatcttcaagatatttaatcaatgcgcgaattgaatttccgtgtgcagaaactaataccgtttgaccatctagcaaatattgtgaaatatgatctgtccaaaatggtatcactcgaactaaagtatctttcagactttcagaataaggcatcatacgtttatctaaatgattatatcgacgatcagctaagtaagcttcacgttgttcttcggtttcagcaggcggtttcacatcataagaacgacgccaaatatgtacttgttcttctccaaattcttttctagcatcatctttatttaagccttgcaatccaccatagtggcgttcatttaaacgccagcttttatatacaggaatccattgttgtttagattcagttaaaatataatgcgttgtatctaaagcacgtgttaataacgatgtaaaagctacatcgatggcaatgttattttctcttactttttcacctgctctagtcgcttcattaataccttgttcagataaattaacatcttcccatccagtaaataagtttttagcattccactcgctttgtccatgacgacataaaattaattttggcataacttataacctctttcctttaatctttaggacgttatttcagggatattttaagatgatttaatcttagtaattttcttttcaatatgttttaaaattcaatgattaaatcaattatcactagacattaaatacataaattctattccccattttcattttttaattcataaatgaatcaataaccacctaataacaaatcatattatacacctttgttcgccatttttctaaggtttaaaaaatatttttaggtgcacctaaaaataaatgtaataaaaacgcctcctcagatatttatatatctatgaagacgtttaaatacattatagatggtctggttctgggtgaacgtatactgaggaaataccttttttgtgcaaatgatgttcgacattgtcacaaatttgatgcgcttctactaaggaaaggttagcatctacaacaattgtgacatcaataaacacactacttccatggtaacgccctttaatacttttaacttcttgtacttcatcaacttctaaaatatcattgcgatacgcttctaattcagtttcattgaaaccatcactcaacataaaaattgcttctttaaaaataccaaaaccagtataaacgattagtaagcctagtaatgttgctaaaataatatcgacaattgggaaaccgatttgcgtaaaaattaatcctatcgctgttccaatgctgactaaactatctgataaattatctttggcagccgaatttaaagaactacttttcgttcttttcgctagtctttgattgactgcaaatacaatcaacattacaagaccactgattaagctgacgataattgttattgcgttaggtacaacgtcatcttctttgaacaaacgaggtgcattttgaataactacttggatacctacaaacataatgacaaatgacaccaataatgaagaaatattttcagacttcaaatggccataaggatgatttcgatcggcaggtttaattgaaattttcaatccaataataacagctaaagaaacgataatatctgtcatattgtttaatgcgtcggctcttacagctgcagagttaaagacaaaacccgtgacatacttaacaatagataagattatatatacaattaaactcaaataagcaccgcgttgcgccaatttaagattttcattatgagacatgcgttgaaccaccttgaattagtatagtaacaatattatgaatgatttattttaaatttacaacgtttttaatttttataattttttataaaattaaactaatttattcattcgcaacccctaaaaataatttttagcctttctgcgaattttatgagctagaaaggcttatgcattagtagcgaagctaactaatgcgttcctttattttctgcgaattttatgagctagaaaggcacccaactctccctgtttgttaactttcgtctcgaaagtttctatgttgggacccaatgcatgagttgcgaagctatctaatgtcgtgacctaattatatagaagaaaaagtgcatcagtgacaaatcaaatgagatttctactctaccaaactctcttcgaaagacaattttctcctctatttattagcaaactattgcatttctccatatagtacttccttacttaaaatacgctgaatgttctgaattaaacgcttttttacatagttaacactagttaatctattagttaacattagttaataattagttaatttccatttgtattctcatgtgataaattctaaaagcatacaataaatttaatatgtaaaaagaaagggaatacacatgaaaaataaatatatctcgaagttgctagttggggcagcaacaattactttagctacaatgatttcaaatggggaagcaaaagcgagtgaaaacacgcaacaaacttcaactaagcaccaaacaactcaaaacaactacgtaacagatcaacaaaaagctttttatcaagtattacatctaaaaggtatcacagaagaacaacgtaaccaatacatcaaaacattacgcgaacacccagaacgtgcacaagaagtattctctgaatcacttaaagacagcaagaacccagaccgacgtgttgcacaacaaaacgctttttacaatgttcttaaaaatgataacttaactgaacaagaaaaaaataattacattgcacaaattaaagaaaaccctgatagaagccaacaagtttgggtagaatcagtacaatcttctaaagctaaagaacgtcaaaatattgaaaatgcggataaagcaattaaagatttccaagataacaaagcaccacacgataaatcagcagcatatgaagctaactcaaaattacctaaagatttacgtgataaaaataaccgctttgtagaaaaagtttcaattgaaaaagcaatcgttcgtcatgatgagcgtgtgaaatcagcaaatgatgcaatctcaaaattaaatgtaaaagattcaattgaaaacagacgtttagcacaacgtgaagttaacaaagcacctatggatgtaaaagagcatttacagaaacaattagacgcattagtagctcaaaaagatgctgaaaagaaagtggcgccaaaagttgaggctcctcaaattcaatcaccacaaattgaaaaacctaaagcagaatcaccaaaagttgaagtccctcaaatccaatcaccaaaagttgaggttcctcaatctaaattattaggttactaccaatcattaaaagattcatttaactatggttacaagtatttaacagatacttataaaagctataaagaaaaatatgatacagcaaagtactactataatacgtactataaatacaaaggtgcgattgatcaaacagtattaacagtactaggtagtggttctaaatcttacatccaaccattgaaagttgatgataaaaacggctacttagctaaatcatatgcacaagtaagaaactatgtaactgagtcaatcaatactggtaaagtattatatactttctaccaaaacccaacattagtaaaaacagctattaaagctcaagaaactgcatcatcaatcaaaaatacattaagtaatttattttcattctggaaataatcaatcaaaaacatcttctctagttttacatcattttttaaataattttcgtaataaaccgtgattaaaaagaaccgttgattctcaatcgaatctgcggttctttttcattttccatcaattaaatgtttcttcgctacttgtcagcccacttttttacctgcaacttgttaaataatccttacatcgttaacgaatagttcatcatttagttgaatcagctcaactttattaacttcaaattttcacaaactattgcgcaatccattcctcttccactacatgcaccataattaaacaacaattcaatagaataagacttgcaaaacatagttatgtagctatataaacgcctgcgaccaataaatcttttaaacataacataatgcaaaaacatcatttaacaatgctaaaaatgtctcttcaatacatgttgatagtaattaacttttaacgaacagttaattcgaaaacgcttacaaatagattattatatatatgaacttaaaattaaatagaaagaaagtgatttctatgattaaaaataaaatattaacagcaactttagcagttggtttaatagcccctttagccaatccatttatagaaatttctaaagcagaaaataagatagaagatatcggtcaaggtgcagaaatcatcaaaagaacacaagacattactagcaaacgattagctataactcaaaacattcaatttgattttgtaaaagataaaaaatataacaaagatgccctagttgttaagatgcaaggcttcatcagctctagaacaacatattcagacttaaaaaaatatccatatattaaaagaatgatatggccatttcaatataatatcagtttgaaaacgaaagactctaatgttgatttaatcaattatcttcctaaaaataaaattgattcagcagatgttagtcagaaattaggctataatatcggcgaaaacttccaatcagcgccatcaatcggaggcagtggctcattcaactactctaaaacaattagttataatcaaaaaaactatgttactgaagtagaaagtcagaactctaaaggtgttaaatggggagtgaaagcaaattcattcgttacaccgaatggtcaagtatctgcatatgatcaatacttatttgcacaagacccaactggtccagcagcaagagactatttcgtcccagataatcaactacctcctttaattcaaagtggctttaatccatcatttattacaacattgtcacacgaaagaggtaaaggtgataaaagcgagtttgaaatcacttacggcagaaacatggatgctacatatgcttacgtgacaagacatcgtttagccgttgatagaaaacatgatgcttttaaaaaccgaaacgttacagttaaatatgaagtgaactggaaaacacatgaagtaaaaattaaaagcatcacacctaagtaaacagttcaatcattttaaaaaatcctgggacacttcatacttgtctcaggattttttaacatattgaatcagcctcataacattaaattattttatcgtacattaaatttaataataacaactgatttttataagaataaagtatcgaaccatagtagatacacaaataatacaaatgaaacaatttaacttgaaagcttaaataaatattctcaagttaataaacaattaatttttagatggattcatcaaaaatcgtaaaaaagcacaatttgtattttacaaacattaattaaaaaagaaagcaagacattcgtgcaatcggttaccttaaattgtttacaactgtcaacaataccaaggttttattaactatatttctcacaaaattagcttttagcattccaaacaaaaaaggttaaatcgaacggaattatggcatttttaacttaattgtaaaaaaagttgataatggtcaattgttaatgaacagttaattataataacgtccaaaatatattattatttaattaagttaaataaaattatagaaagaaagtgaaacttatgcttaaaaataaaatattagctacaactttatctgtgagcttacttgcccctcttgccaatccgttattagaaaatgctaaagctgctaacgatactgaagacatcggtaaaggaagcgatatagaaattatcaaaaggacagaagataaaacaagtaataaatggggcgtgactcaaaatattcaatttgattttgtgaaggataaaaaatataacaaagatgctttgatattaaagatgcaaggattcattagctctagaacaacatattacaactataaaaaaactaatcatgttaaagccatgcgatggccattccaatataacattggtttgaaaacaaatgataaatatgtttctttaattaattatttacctaaaaataaaattgaatctacaaacgtgagtcagacattaggatacaatatcggtggtaatttccaatcagccccatcactcggtggtaatggatcatttaactattctaaatctattagctatacacaacaaaattatgtaagtgaagtagaacaacaaaactcaaaaagtgttttatggggcgtcaaagcgaattcattcgccactgaatcaggtcaaaaatcagcctttgatagcgatttatttgtaggctacaaacctcatagtaaagatcctagagattatttcgttccagacagtgagttaccacctcttgtacaaagtggatttaacccttcatttatcgccacagtatctcatgaaaaaggttcaagcgatacaagcgaatttgaaattacttacggaagaaacatggatgtcactcatgccattaaaagatcaacgcattatggcaacagttatttagacggacatagagtccataatgcatttgtaaatagaaactatactgtgaaatacgaggtcaattggaagactcatgaaatcaaggtgaaaggacagaattgatatgaaaatgaataaattagtcaaatcatccgttgctacatctatggcattattattactttctggtactgctaatgctgaaggtaaaataacaccagtcagcgtaaaaaaagtcgatgacaaagttactttatacaaaacaacagccacagcagattctgataaatttaaaatttcacagattttaacatttaatttcatcaaagataaaagttatgataaagatactttagtacttaaagctactgggaatattaactcaggctttgtgaaacctaatcctaatgactatgacttttcaaaattatattggggagctaaatacaatgtatctataagctcacaatctaatgattcagtaaacgtcgttgattatgcaccaaaaaatcaaaatgaagagtttcaagttcaaaatactttaggctatacatttggtggtgacattagtatctctaatggtttatctggtggacttaatggaaatacagctttttctgaaacaattaattataaacaagaaagttacagaacaacattaagtcgcaacacaaattataaaaatgttggctggggagttgaagcacataaaattatgaataatggttggggaccttatggaagagatagcttccacccaacatatggtaatgaactcttcttagctggcagacaaagcagtgcatacgctggccaaaacttcatagcgcaacaccaaatgccattattatctagaagtaacttcaatccagaatttttaagcgtactatcacacagacaagatggcgctaaaaaatctaaaattacagtaacttatcaacgtgaaatggatttataccaaattcgttggaatggcttctactgggcaggcgcaaattataaaaactttaaaactagaacatttaaatcaacatatgaaattgattgggaaaatcacaaagtgaaattgttagatacaaaagaaactgaaaacaataaatagctagtaaaacacggtcgccaacagtaattgtgacgaccgtgttttgatttattatcttagtaagactgccattctttttctcaatgtgagatataaaggaatagctacaattaaagtgaatattacgcctggaatcgcgtttaacaacactacccacactggtaaatttaaaataatagataatagtagcctagataccaaactgcctaatacacttgctaaaactaatgatagtacatttattttcaataaataaacaactgcaatagctataactctaaatataatagaaataatcacattaattggattaaatacgccaaatatcagcaataataagcttgataaaagcccacctaaaaagtactttttaattccaaagaaagctaatatcaataatgctgccggtgcagataattgaaaatctaatcctggtataatggacggtattttcaaaactgccaaaatggttaaaatcgcagcaatgacactaatttgagtaatatcttttgatgtcatactaaaacccctataccgtttcataaacaacttgcttcggtgtgctttctaaaaatgatatgtaatgatttaaatcaatacaatcgtccacaaatattattctgcctccatatctcgtattaactggtttaatatcaaataatcgatggtaaccaattttagcagcggcaaaataacctgtcgtatacgttaagtcatcggacacgcaaagttctcctttgacatacggatgcgcattgatacaactagcaattgctaaggcatcagtcactctttcattaagatcacctttattatttatatcttcaaacgaaaaatgtgttgccctaatccccctttgtccaaatgaatctaaacgtttaccagatatagcagatagaataatagctcctgtataaaccgtttcatttttaatatatgtcatcccttgatttagcgcttgttcagtgacaccacattcttgtgttaaatgttggagatttgctttatcatcctcaataatttgtaatgcttttatttgttgaatcggttccatgattttttgtatttttatattgagaaaatccggttgcccattttcatgaaaaaaacctttattataaaacctttgtaccgtctgttctattttgtcaaactcacaaatcgtttcagcaccactaatatgaacatcttgattgctagaacgcatttttatactatacatgacgatcacctcaatcttcttgatgcaaaatttcaaacaacctatctatatcttgttcagtatgaaaatacgacaatgatattcttaacattggcttagtcacagttggataccttaaataacttgtaaacacatgatgctttaataatgtttgatgaatgttctcagccgcttctatgtcatcaaactcaataaacttaatcggcgagtttgaactattataattaacattgagtgcttttaacttttggttaaaatatttactcaaactatttaatttagtgcgtctatcatcagcatttattaacttttcaatgtttctttttataaaatacaaattataaattggcaaactacttgagtagatgagtggtctaccgtgattaattaacatatccttcacatcatttgaacttaaaatcacacccccgtatgcaccacatgctttagataaactagaagtgagtatatctacaccttgataattcgagtaattctctattccaaaactatgtgaaacatcgagtatcagtgttgcgttatatttatgctttaatgagactaattgaccaatatccacaacgtcgccattcgttgaaaatacactatcagatatgattatttttggtatattttgattagggtatttctctaaccttttttctaaatcagcaatatctaaatgcttatatatcactttttctaaaccacttaacttaataccgtcaataatactcgcatgattttcttgatctgaaaacacgacacaatttgtatttttgaaaatattaaataacgccaaattagcatcataaccactatttaagatagtacatgcactatatccgagccaacctgctaacattgtttcaatttcttcataagctgtcgaacttccactaattaatcttgaacttgataagtgataactatacttccgcataaatctttcgaaatcatccttatcaaacgctatttgacctaatcctaaataatcattagatgtatagttcgtacatctcttattttctacttcaatatactgtctatctatataccctaccgatttaagcgaccgatataaccctttctgttgtaataaatcaatttgctcttgaaacttcattcttgttttccttattttcacaagtgtcataatcaatttcaaagcctaaatcattaatcatatcgtagtctaattggttcggttgcccaccagtaattagataatcaccgacaaatattgaattcgccgcttttaatgctaatggctgtaacgaacgtaagttgacctctcttcctccagcaatacgaatttctttcgtaggattgattaatcggaataatgctacgattcttaaacatttcattggtgttaaatcatccatgcttccaaactttgtgcctttgattggatgcaaaaaattaatcggaatactgtcggcatccatttcttttaaagcaaatgccatatcaacaatatcttgattagattctcccataccacaaatcacgccagaacatggtgatatattattcgctttcattagttctatcgtatctgttctatctttataactatgcgttgtcacgacgttatcatggtaattttcacttgtattaatattgtggttatatctgtctacaccagctgacttaagtttcttagcttgttcgtcattcgttaatcctaaacatgcacagatttttagttgcgggtgttgagatttaatcgttcttacagtattactaatatgatcaacttctttatcgctcggtcctctaccactcataacaatacaatatgttccaatatgattatcatgtgccacctttgctccatcgataatttgttcctctggaattaaagcatatcgctgtttttgtttaatatctcgtgattgtccacagtacccacaattttcaggacatataccacttttagcatttaaaatcatgtttaattttacttttttaccaaaataatgttttcttaaaatgtacgcctcatttaataaatctaaggtatcaatattagtatcctcataaattttcaatacagtctcttttgttaattgttccccttgtaatatgcgtttagccaaattcatattaacacttcctatctaaaatgttatgtactgcctttttaaaaatacgtaccatcgttttcacttctttatttgacatacttaacactggcacaaacgtaatgacattttctaaatttctaatcattagcccgttttctttacaattacgtacaatacgttcaactttttcaatttctaacggcgttttactatctttatctgtaactaattcaactccaaacattaagcctcgtcctcttacatcaccaacatttcgatgacgcttcagcgcatgtaactgtttctcaagtgttgatgatgtcgtttcaatatgtgacaataacttacgtttttcataaagtcttatattttctaatgcaaccgtacaaacgatttgatttccggtgtatgtatgaccatggaaaaaggtattcacaccatgcgaatcacttaaaaatgcattgtatatttttttagatgtcaatgtagctgcaagtggtaagtagccaccagtaatcgccttacctaaacacataatatccggttgaacatcttcatgattgcatgcaaacatctttccagttctcccaaaaccaactgctacctcatcacaaattaataagacatcgtattttttgcacaatttctcgacttctttcaaaaagcctttaggatgaacaaacaagcctgtcgcaccttgaatcaacggttccaatataaaccctgcgatttcatcatttctttcaattagaatttgctctatattcgttaaaatagctgtcatcatttcattttcagtatcgtaattactgcgatagaaagatgggctttctacttgaatattctcaaatattaagtctttaaatattttatgaaaggtcttgataccaccaacacttaccgcaccaatcgtatccccatgataaccgtgatttagcgttataaacttgtttttcttggcatatttttctctatcaatatttttccaatactgatatgccatctttattgcgatttcaacagacgcactgcctgtatcagaataaaatacttttcttagattacttggcgtgatttcgattaatttttccgcaagttctattgacggaatatttgatgatcctagcagcgtagaatgggcaattttattgagttgctttttaattaccttattcaagtatttgttattatgaccatgcacattgacccacaacgatgcataaccatctaaatatttattgccattcgtatcgtaaaggtaactaccctttcctttttcaatgatgattgcttcttctttgctatatacacccatttgtgtaaatggatgccaaacatattctgagtctttttgtttaagttgttgtgtgtaattcatttttaactcctattaattgttttaaaaatgcttctgagaaattttcatacgtggcatgttcttcaaatgtatagactgttttatttgttaattttccaatcgtaatttgattgtctttttcaatatagctgtctgtatagcgattcattattaaaaaattactcgccgatacattctgattaacataatcttggtgaacaatggcatcgctaatagcacctaattttgatggcaacacactgatgacacaatctgcacaatcattgattagatctttagtcatgtagaaatcatctgtaccttcatatattggtacggcaattcccccagcaccctcaattaagataaaatcaaattccttatctaaaacttttaccttatctaatacacgctgcttatttagaaaaatttgatctgtcattttaaatgcaaggtgtggtgatacaggttgcttaaaagtataaagtgacgttatgtcatagcttaaatcacattcatttttaaatacttctaaatctggaaacgtcccgtcttggcgttcctcagtttgaaatggtttaaaaatacaaactcgatgaccacgtgttttcaaagcatggtataaatgctttgtaacataggttttgcctacatcagtattcgtacttgtaataaaaatcctcataaaaaataagcacctcaatccgaatgtaaacttttataattaataagtttacatttaaggcgcatgtttttcaagaaaacatgaatttaaacttctcagtataactataaattttggcaaaattttgaccttgctattgaaatgactaagacttcttaaggaattcgggcagatataaacagcgattcgataaaatatgtcagttaaaattaataattgcattatttcttaataaaaagacatcctagctttaccatcttgtgaaacaatccattaattgtaatattacgttgagcgccttgttcatcaatgctataattagttacataataaattgaacatctaaatacaccaaatcccctcactattgccctagtgaggggatttattttgctgttgattatctatcaccctttttatttccaaattctgattccatattaaactattatttataatttccagcctgctgatttactttttattcttataaagtcttgatacattcctggttttcgaattaattcatcatgactacctttttgaattatttcaccttcattgagcactataatctgatctgcatttttaatagtttcaactttatgtgcaattgtaattactgttttgcctttacttaattcattaattgccgtttgaatcagctgttcattttcagggtcaatacttgcagttgcttcatctaaaataattattggtgcatcttttaatatcgccctagcaatagaaatcctttgcttttctccaccagataaattactacctttttcatttagcattgtttgatatccctcaggtaatgacatgatgaagtcgtggcaacatgcttgcttcgctgcacgaataatttcttctttcgttgcacctggattgccaaacaatatgttattttcaatcgtatcattaaataaatacaccttttgaaatactgcactaattttcgacattaacgtacttaatgtcatatctttaatatcaacaccatcgatgcgaatatttccatcatcgatatcataaaagcgcaagagtaagtgacataatgtagatttcccacttcctgaaggtccaattattgctgttgatgtttgtgtaggtatctcaaaattcacattctttatcacttgtttatcatcatatgaaaaattcacgttttgaaaagcgatattttcatttttaatcgtcaaattttttccattctcatccagttctggagcattttttatcttttcaatatcatctatcgtcatatctatcatttcaagtacgtgtgcagcactattaatattttcaacactatcaaatatcacaaatgaaaaaattgaaatcataataagggtaggtaaatcaatactatgattcatatataataagcatgcaactaatacaatcattattgaaacaacttttaaactaagtaaatgcaataaattgaatgggatatattgcatttctatttttgtatttatacgtttactttcattgactgcttggttaaaacttttaagactcgtattttctttcgcgaatgattttattacttgaataccacgaataacctccaataccttttccactaattggttttgtacattatgatacgctggcgcattttgtcgactctttctttctaataattgaatcgcaaaaaatgatagtaatacgccaatgcatgctaataatgatacttgccacgaaactacaagtagagacaatatgagtactgtaattaatatgtatccattaacaacaacgtccaccattttcatagcaaagttttctaaaaaggttaaatctgttgttactattgttgttaactcatttgaatgatgcgaattaaaataacctaaccttacatttttcaatttatcccctatatctaaacgttctttcgcactcatttcataagcgatgctctcatggcttttgcttttgaaatatgctgtaataaatcgtccaatcactaataaaaccatgataattacaacattcaatatatctttcatataaataggtttatgagatagcacattattaaatatttttgcagctaaaaagataggtaacgcaataaaaatagcatttaaaaatgacatgctaaatcctaaaatcattcttgctttatatggtcttatccagtttaaaattttaaatgtaatttgaaacatatttgacctccttttctcattagtttaattatgtccagtattgattccccaatcttttgtatgcatatgcatatcccacatatttttgtaatgagcttctaattttagcaacaattgatgtgagcctttctccaaaatttgttgtttacctaaaacaataatttgatctgcatgttgaatcgtagataaccgatgtgcaataacaatcaatgttttatcctgcgtcaacacatttaatgcttcttgaattttttgttcgttgtctggatcaacgtaagcagtcgcttcatctaatacaatgataggcgcatcttttaatatcattcttgcaatagtgactcgttgtttttcaccaccagacaatttatctcccactgtaccaacattcgtatcatatccatctggcaacttttcaataaattcatgacattgtgctaacttggcagctttttcaactgcctcatccgtagcttctggattgccaagtttaatattttctttaaaagtaagatttaataaaaagttatcttgtccaacaaaaccaactaaatcgttaagttgtttcgattcaatatcttttatatttataccgccaatcgtaatttcacctgaagtcacatcccagtatcgtgatataagcttggcaatggttgacttaccgctaccagatgccccgacgatagctgtgaaattattttctggtactgtaaatgataaatgcttaaagaccagatcgtccttatctttgttatatgaaaatccaacattattaaaagcaatttcataatgttgaggcttcttaaattttgttgacaatactaactcttctagacttaatatttgattcacttcagttaatgcgtattgtatagactttaaatgatttacataattagtaaaattcttaatcggtgctactacacctaaagataatacgatgcataggaaaaattccgcatagtttaattggttgatagatatcaaatacatgccgaccggtaaaatccctaaaaatgttgaaggtaatacactagctcctaaattcatatacccccatgtatttttaaaccaattcaaagtgtgaatcttataattatctactgcatctttatattttttatatgaactttgagattgattaaatgttttaattacctcaatgccttcgataaactctacaatcgcgctattcatataattattcgatttcatttgttcagcatatgtctcattaaatccagacataacttttttaaaagcgaaaattgaaattggtatcgttactaataaggcactagccatacgccaatcaatgagcattatgtataaaaagatagcagctgacaaaagtaagtttcctataacttcaggaatcatatgtgctaaaggtaattctattgtttcaaccttatcgacaaatatattttttaattcacctattttcttagattccactacgcctaaagggagacgcattaatttttgagctaattttttacgaatttcagataaaatttcatatgccgtaatatgtgatagcatcgttgacgctccaaaacaacacacttgtgaaatataagcgattaaagcaataaagatataaaccataatcgaattaatcgtatatgtattgttaatcatcattaaaataattttaaatactgcccaataaggaactaatccagaaaagacactgatgatagacaacaaaattgataacataattttccatttactatcagaagcaaatccgctgagtatctttatccaatttgtctgattgttcatcgtatatgtaactcctttcaattaataatctaaattaagccgcttatattatttatttcactggatgatatacataatataaatttgttatttgttaaaaattaatacttattacaagtacatcatatattagttgataacgattatcaatgtcgcgtggatttgtgacacatttcttttaaaaattcacaaggttatggggcagaaatgataaagagccactaatgatttattatgtaatgattctttatccttagccacagctaatatgtacttaaaaataggaatacatgagtaaaactctatgttgggactccgccaacttgcacattattgtaagctgactttccgccagctactgtgttggggccccgccaacttgcattgtctgtagaaactgtggatccaaattctctatgttgggtccctgagtatagccttgtagagtctagtacattgatttgtatcccaatgtccctataattgattattcgctttatctaatgatcctatgactcaactattaaatcatttttcgaaatacttaattctaatataattaaattcatttattgtaatattacaaaatacattgcacaccttgtttatcaatgctataattaattacataataaattgaacatctaaatacaccaaatcccctcactactgccatagtgaggggatttatttaggtgttggttatttgtcaccttttttattgttgcgcgttcgtaaccaatgtgcaaaaaacgcaacaagacagccgcttaaagctgaagtcatgatgttaattaataaattgaacatccatcatacacctcctctctgcgttaaagtaacgcccgagatgttaggcgaccattatattatatcatttatttattatatttcacgcaatattaaagttcgaataaagcgttttttagtggtttacgctactttaattactatcttttaaaatccatttagataatacaaatgtgatgggtatcgtaatcactaaacctgcaaatggcgcaatttccgctggcaaatttagccaggatacaaaaacatataataaaactgtttgtaagcttacgttgacaatctgcgtaattggaaaactaatgaattttctccaagtaggttttaccctgtaaacaaaataacaattcaaataatacgaaatcataaaagcgactagaaatccggtaatatgactaatcatatattcaatgtgtaataattttaacagcaataaatagacaacataataatttaacgtattaatgccgccaacaatgataaattttaaaatttcagcatgcgtttgtgttagtttcatatgtgtaactcctcaacatcaaaatatatgtatagctacgttctccaacatactcgaatatgcgagccaatccgcttcacttcaaatttacttatttcaacctttataccctttcacagcaaatttagtctctttcctctcatccttatacgccattataatgtaactgatttatcgcgtgactcattagcactatagagattactttagttcactagtaattttatatacaataagagcgacaacagtaatgagaggatgtctactatgcaattacaaaaaattgtcatcgctcctgactcatttaaggaaagtatgaccgcacagcaagttggcaatattataaaacaggcatttactaatgtttatgggaatacccttcattatgatatcattccgatggctgatggtggtgaaggtaccacagatgctttaatgcatgcaacaggtgccactaagtatacagtcatcgttaatgaccctttaatgcgacctattgaagcatgttatgcacgcgcagacgaacaacaaattgcaattattgaaatggcggcagcgtcaggtttggatttattagaaaaagaggaacgtaatcctttatacacatcatcatatggtaccggtgaactaattaaagatgcattaaatcatggtgctaagaccattattttagggattggtggcagtgcaacaaatgatggtggtacaggtatgctaagtgcactaggcgtaaagtttactgatgtaaacggggacttattacaaatgaatggtgctaatcttgctcacattgcacaaatcgatataaccaatctagattcgcgattaaaagaggtgacctttaaagtggcctgtgatgtttcaaatcctttattgggtgaaaatggtgctacctatatttatggtcctcaaaaaggcgctgatgcaaagatgataccaaagttggatttcgcaatgtcgcattatcatgataagataaaaatgtgcacaggaaagtccgttaatcaaataccaggttctggtgcagctggcggtatgggcgcagcattattagcgttttgtgagacaactttaacaaaaggtattgatgtcgtctttgacattacagattttcatcaaagaattaaagatgcagacctcgttattactggagaaggacgcatggattatcagaccatctttggtaaaacacccgtaggcgttgcgttagctgcaaaacaatatcatattcctgtcatcgcgatttgtggcagtctaggcgaaaattatcaacatgtttacgatttcggtattgatagtgcctattctataatctcttcacctagcactttagaagatgtcctacaaaatagcgaacaaaatttattaaacactgcaactgacattgctcgtattctgaaattacaataatgtcaaagtaaatcatcagctttattatttgcagttaaaacttgaatgaggtgaaacccatgaaaagaactgataaataccgtgattcatatcaatacgacaatcaaaaccaaaatcatcgtcgtcaatctgaagacgcatcgtatagacaacaatatgctaaaggcgatcctgaagaacacccggaacgatactataatggtagagattatcgaagagaacaaattcttgaagaagaaaacgagaaatcccgccgttcaaaaaaatggttatatatcattattgccattctcttaattattgtcgctatttttgtcacacgcgccttacttaacaatgatagcgataaagttagtaatgaccctaaagtctctcaaaattataaaaaacaagttgaaaatcaagacggccaaattaaccagcaagtagataatgctaaagaaaatattaaaaacaaccaaaaaactgatgacattattaaaaatttacaaaatcaaatcgacaacttgaagcagcaagaacaaaacaaagctgattctaagctaactcaattttatcaagaccaaatcaacaaattgacagaggcaaataatgcacttaaaaacaatgcaagccaaggtaaaattgaaagcatgttaaatgatattaatacaaaattcgacagtattaaatctaaattagaaagcttatttaaagatgacaatggtggcgctaattaattattacacctgctttgatgataaacattaattccctatactttatctgtatcactacgttattcgtgatgatgcattaagagtatagggattttttatataaacttgtattctaactacatacaaatacacacaaaacgtatataatttatataattatatcatttaaaggagtctgatcatgcaatcaacgaaaaccaaaacgaagcatttttcatttttattgctaattacgttaggcgtcatgaccgcttttggcccactaactatagatatgtacgtaccatcattacctaaagtgcaaggtgattttggttctactacatcagaaattcaattaacattatcattcacaatgattggtcttgcactaggccaatttatctttggacctttatccgatgcttttggtcgcaaacggattgctgtatccattttgatcattttcattttggtatcaggtttgtctatgtttgttgatcaattgccattattcttaactttacgatttattcaaggtttaactggtggtggcgtcatcgtgattgcaaaagcctctgctggtgataaatttagtggcaacgcactcgctaaatttttagcatctttaatggtagttaatggcatcatcactattcttgcaccattagccggtggattagctttatccgtagcaacatggcgttctattttcacaattttaactattgtggcactcatcattttaattggcgtcgcttctcaattacctaaaacatctaaagatgaattaaagcaggtgaattttagtagcgtcattaaagattttggaagtcttttgaaaaaaccagcatttattattccaatgctattacaaggtttaacttatgtaatgctatttagttattcatctgcatcgccatttattactcaaaaattgtataatatgacaccccaacaatttagtatcatgtttgctgttaacggtgtaggtttaatcattgtcagtcaagtcgttgctttattagtagaaaaattacatcgccacatattattaatcattttaactattatacaagtggtaggtgttgctttaattatcctgacacttacattccatttaccactttgggtcttactcatcgcattcttcttaaatgtgtgtcctgtgacgtcaattggaccgcttggtttcacaatggctatggaagaacgaacaggtggcagtggtaacgcatcaagtttacttggcttattccaatttatcttaggtggcgctgttgcaccattagttggcttaaaaggcgaatttaatacatcaccatatatgattattatcttcattacagccattctattagtcagtctacaaatcatttactttaaaatgattaaaaagcaacatgtcgcataacacttcaacataattagaaccctagcaaagatatctatctttgtcagggttcttctttatgaattatgagatcgaatcttcaactaaaattacgccttcatagcaaggacatttctattcaatcaccctttaacaggcatccaaatttctgtaatatatttttcacttgtagtatcaccatcctgatacaactcaaaaaatggtgctgattttaccgtatctgcttgatattgatgtatgtagtgatgaacctcttccattttttgttgaactgctttaggtactgcgccctgtgcttcaaataccatatactttgaacttgctaatgttatgacatcatatttttcaatatcagcactattatctccggtaactgcaatcatatatgacatcttaccgtctaattcaggtatacataagccaagtatcccggctaaatcaccattattttttaactgtaaatccgcaattactccctcttgataacatctttgccaaaaccctgctatatgttgctgagcctgtcgtccattttcatacgtttctttaatacctactaacgttaacgacgcaagttgttgtaattgatattccattttatcactccattaattttattcactcatgtaaaacatatgtttaggacattttgcattgacgctatataattatattaaatatttattgaatcaatgcgaggactatattatgaaccgaaaaatattaccagttaaacctatcagtcagctatttcctatccctatggtcatggggtgtgaaggtgtttccgcagccatgatgttgcaatacaataaccaacatatccctgctacagaaattatgagacattggccgacacatccgaacaatccacataaaggttatgttggacatcacttattcattaagcttggcaattatcatcaaacgatatttccagaagcatatgtaccatttttacaaaaatacaatcctaatatcgtagacggcactggtaaatccttagaagatcttaaaggtattatcgatcaaggtcaacctgtgttaatataccatactaatcttggttctaaaccattactacgtgttttccgctttgataacaagccagcgaaacaagtttcaaatattcacgtaacgttactcattgggtacgatgattactattactattatatcgatccactttggagtcatattcgtcgtggcctagttttacctgccatcattccaaatcgcaaacaaattattaaaattcgtaaagagaaaatggaatacagctttaattcaccaggaagaaagtgcatttatgtgcaaccacattcatatacaattgaaaatcaacaacaaaataaacacacgtaagtaaacacattactcgcgtgtgtaaaacataaaatgcgcaaactgggtcaggtttgcgcattttaaatttctattatttgtatcgtctcatttatttcctggtaaatatcttctgaacgccattgtcttggatagcctagacacggacagagataacatctgccatcatccatcacacttttacgaaaatgaacatggcccataatactatatggtatatcgaacatcgcatacaaaggattgaaatcacttgtcccaataaatgcattataaaaatcgaatatacgatgtggcataggaacaatgaaatcagggtgcgtcacaacatgtgtgactaaaatcactcgtctatttcctacttctaatatatctttcttcacttgttcagccgctattttagataaattttgatctgatatgccccaagatattcgttctttatcttgccaagtcgcaccataatgttttcctctttgtaactcagctaatgaaaatcgttgtgctgcaaagctataatcataccaacctgtatgtcctattattgcccattcttcatttactataaatggttttcctaccaagcactgtgacatactcttataattattccaaatgtcttgcgtagtcatactttcaacttcccataaatcatggtttccaggaacaaatttcacaggtatatctaattgttttgtcaattgcgttataaattggtgcgtcaattgataatgatttgagatatctcccgcaatcaacaatatatccaatttcttatacttaactatttcaaccaatgcctctaagtaatcttcggatgtttttttattatgacgatcaatatgcaaatcggcgattgtccctatcttcatacccataccttctttactcaaattaaaatgttatttattatgccatagcttatctaatatatatagttaactgcttcatttagatgattattttatatttttgcataaaaacttatatcttttcaaaaaatcgataagttttagttatcatacccttgcctatcaaatgttttttcttatatttaaaaaaataattgctttattaaatggatttctttagtatttataattaagaaaacgcttacacacaacttttttatttgctttatcctgaggaggaaaattatggcaagaaaattgcatagagagttgaataacagacacatccaattgatagcaattgggggcgcaattggaactgggttattcctaggatcaggtcaaacaatatctttaactggtccatcactgttattcacatacatgattattggggttgtactattcgcttttatgcgcgcattaggcgaattgttgttgagcaatacaagatttaattcatttgttgatattgcaaatgaatatttaggcccttttggtggctttgtcattggctggacttactggttatgttggattgtatcaagtatgtcagacctaactgcgatgggacaatactttgcattttggtatccacaagtcccaaattggattaccgtgctatttattgttttaatcttgattagcttcaacttattaggtgccagattatttggtgaactggagttttggttctctattattaaagttgtcacaattattgcgatggttatcgttggtcttgtattaatctttttctcatttaaaacacattatggacatgcatcattcacaaacttaatcagtcacggtggcatgttccctggtggaacatttggtttcttaatgtcattccaaattgctgtatattcattcattggtattgaacttataggtgtaactgctggtgaaacgaaagatcctgaaaaaaccttaccgaaagcaattaataatgtacctatccgtattttattattctatatcggtggtctattagtaattatgtcagtcataccttggaatgatatcgatccaaatagtagccctttcgttaaactctttacattaatcggcgtaccatttgcagcaggtgtcgttaactttgtcgtgctaactgccgcggcctctgctacaaatagtggtatctattcgaatagtcgtatcttattcggactgtcacaacaagggttaggtcctaaagttttaaataaaacgaatagtcatggcgtgccttatttatcaatgttagtttcatcaattgcattacttatagcagccttgttaaactacattttccctaatgcaattcaactattcatatacgttacaacgttatcaactgtgttgtttttagttgtttgggcaatgattattgttgcttatctaatgtatttgaaaaagcatcctgaggcacataaaaacagtaaatttaagttgattggtggtaagcctattgcttacattattctagcgttcttcttctttgtattcattttattattctttagtgacgaaacaagagcagctatttatatttcgccattctggtttatatttttatttttcttttataaaaaatacaaaacgaatgctgaaaagctcgcgtatgaacaacgacaaaatgacagcggtcatttcagatatgacaatcaataatttaaacatctcgctctagtatcagttcaaccgatactagagtttttttgaaaataacttcattttatcaatatatctatgtcattatgccttaaaagtgataaaatattaactattaaaattttgaggagtattgtatggcactattagaagcatttttaatttttatttttgctgtgattattagttcggttatcaataatcgattcccgcaaattcctactgcctttattcaaattgcattaggtgtcgttattttcattattccaatacaagttgatttccaattcaattctgaagtatttatgtttgctgttatcgcgccactactttttgtggaaggtacccacgtctctcgaacaaaattattagaatatcgtaaacctatactattaatgtcaatggcactagtgtttgcaactgtagtcggtgttggctattttatacattggatttggcctgccttaccaatgccagccgcttttgcaatagcagcaattttatgtcctactgatgcagtagcagtatctgctattacacgcggaaaattattacctaaaggttctatgacgattttagaaggtgaatctttactcaatgatgcagcaggtatcatttcatttaaaattgctgttactgcattagtaactggtaccttttcattattccaagctgttgaacaatttatcatttcaacaatactaggtgtacttattggtgcaattattggattcgttgtcgttagaatacgtatagacttaaccgctaataaaggtttaaaagataacaataccttaacttttattcaattattaactccttttgtcgtatactttttagcagaagaagttcatgcttcaggtatcattgcagttgtaatcgcaggtctaatccatggtttagaacgcgaccgtttaattagagcacaaacggaactacaaatgaattaccatcaaatttggaacacatttagttatgccttaaatggttttgtatttgttgtattaggttttatgattcctactgtagtcatagatattttccaaacagagccggacaacttttcatttttaatattgatcactatattaatcgctattgcaatttatgcatgtcgatttgtttgggtttatttctggtacaaagatttttatttcccgaaaaatatacaatcttatctagacgaggaacatgattcacatgaaacaccaccttctcgtgtgcgttacgcatttattatgaccatgtgtggtattcacggtacaatttcactttcaatggcacttacattaccatttatcattacaaaaggacaagcattcgaataccgtaatgatttattgtttattgcatctttcatggtattaattagtttaatcttagcgcaaattgttttacctttaattacaccatctgccgaagatactacttttaaaggtatgacttatcaatctgccaaaattttcattgttcaaaaagtgatccagcattttaaaaacgaaagtaaaaaagacaaaaacgatacaaattatcgcccagttttaaaccaatactatggagaattattatttttattaaattcagaacctgataatcaaaatacaaaagaactcaaacgtttagaagatattgcaaaagtaatcgaaacatctacacttgagcgtttaattgataaaggtaaggcaacatatcaggatattaataattaccgcaatattgtcgaattaacagagacacaccgtactgcttcatttgttgaaaaatttgcaaacttcttcaagatgttatggcttagacttaaagcgatgaagcactacaaagccttaaataaagaatctaagaagcaagaatttgaaaattcattcaaagatgttcaaaaaattatgcgtattgtgaatcacaatattattttacgcttaaaagaagaacaaaatagtacaaatgtacttgaagttagcttagtcattaatcattactatgatatgagtcgctcattaaagtggcgtgcacaacgtcgaaaagaacgtcaagaaaacagcaatcaaatcataccgcaagctatgttccataaccacaaattggaagcattgtacttacaacgtcatcttttagatgaattaattcgcaaaaataaaatcaacaatatcgttgcagctcaaattcgagaaaatatcaattacaacgaaattgtcttgtctttacagtccaaacattaagcaagacataacaacacccccgtacatatgagacaaagtcattaccatctcatatgtacggggtttttatattcaacatcaaaaaatcggattgatgaaaagtaaataacctttcatcaatccgattgattatagaatctattttttaagtttaaatggaattgtacatacgttaacattcttttgataaattaaatacaatttcatacgcaaactagtttgattgtgtaataaattatgccaacgtttcttagtaataaattctggtatcactactgtaatcatatagttttgatcgttggctttacgattaatcttatcgataaaacgtgaaattggtcgtataatactgcgatattccgagtgtaaaataactaatcttacatctgggaaatgacgcttccatttctcttggaatgctttttcatcttcatctccaaatgatacatgtaccgcaatgacatcattatttgcaagcatttgtgcgtaataaatagacttatcaactgcagttgtaatgcttgttatcggcacaattgctaaattacgatctactacttctacattatgaacatcaatgtcagaacgtaattgttctgcgatatctcgataatgtttgttaattttcaagaagaaaatcaccacgaacggcaagaaaataagtatcggccatacttggctaaatttagttatgagtaaaatcataaaaacaataaatgtcacgataccaccaagtaagttcacagacaacttacttaaccaattcttaggacgttcatgaatccatttaataaccataccgaattgtgctagtgtaaatggaataaatacaccaaccgcatacaatggaattaaatcttcagtcataccatcaaatacaataattaaaataatggctaatacacctaaaataataattgagttagagtagcctaagcgatcacctctaacagtaaacattctaggcatatatttatctttagacattgaagccgctaacatcggaaaagctgtaaatccagtgttggctgctaataccaaaatcatcacggtcgttgcctgtacaaaatagaaggcagcattatcaccaaatatttgcatagctaattgtgataaaactgtcgtttccgtttgtggcataattccataaacatatgctaaaccaacgataccaactaataaaaacgctaaaattgaacccatagcaattaacgtttttacagcattattagcacttggttctctaaaattggttaccgcatttgaaatagcttcaacacctgttaatgatgaagcccctgatgaaaatgcttttaatagcaagaataatgttactccaggaaccgcagttcctactgatgcatgcatatgtggttgaatatctcctgtcgccacacggaaagtacctataaatattaatatcactaaccctataatgaaaagatatactggataggataatacggtggcagattcagttaaaccacgtaaatttaatattaaaataaaaagtacaagtaaacatgcaatcagtactttatgcccatataaacttgggaatgcagcaacaaatgcatcagcaccagatgatatactaacagcgacagtcagtatgtaatcgactaataatgagcctcctgcaagcaatccccatttttctcctaaattggtcttggacaccatatacgcgccgccacctttaggatatgcataaataatttgcctataagacataattaaagcagctaataagatcagaacagcacctgcaatcggtaaagtataccaagttgcaactgcacccactactgataatgtaatcagtatttgttcgggaccgtaagccactgaagataatgcatccgacgaaagaatcgctaaccctttaaacttcgatatcttttcgtcttttagttctctgttttttttaggttgccctataataagtcttttaaattgattgaacataatctcctattcctttttatagtttttgatggatatcactatacgcctatctttccaaaaagtatagagagttaattaatattttttatgtaattatacacctattaacatataaggtgtcaaaaataatggtaaatatacctctttaattaatttattcaatagaactggtataataaaataaatctcattaggcacttaagtaaatttaacatataaaaaggaacgtttatgactactaaaaaactgtattttctatccatttctattatcattttagtcgccatttcaattgctatatatataacattaaatagcaatacgaagacacggttaaccaatgattcgcaacaacaaatagataaaattatcgagcatgatttacaaaagggacacattcctggagcatcaattttaatagtaaaaaatggcaaagtttttttaaataaaggttatggttatcaagatgttgataaaaaagtcaaagcttctcccacaacaaagtatgaaattgcttctaatactaaagctttcacaggtcttgcaattttaaaattagctcaagaaggtcgattaaacttaaatgatgacgtatccaaacatgtgcctcattttaaaatgaactataatggtcaaaatgaaactattacgattaagcaacttttggctcaaacaagtggtatacctagtgatattacaagcgaagacgccgtaacaaataaaaataatcgtttaaatgatgtaacccgtgcaattatgggtgatgaattacatcataagcccggagaagaatttgaatactcaaatatgaactatgatttattaggtttaattatccaaaacgttacgaagcaatcctatacaaaatatattacaaattcatggctcaagcctttgcatatgacacatacatcattcaaacaaaccaattacaaatcaaaacatgatgctattggctatgaattacaaggttcgacacctgtcgtctctaaacctgaatttaacctttgggatacaccatcagcatatatgatgacatcaactgaagatttggaacattggataaaattccaacttaatccacctgataaatacaaatcattagttcaacaatcacataaaaatttatcttcaacaattggtgaacctaatgccaatgcatatgcttccggctggtttaccaataatgatgaacatttagtgtttcattcaggaacgctagataacttttcatcatttattttactaaatccaaaacaaaattatggaattgttgtacttgcaaatctaaattcggaatatgtacccaaattagttgagcatcttaatacacaaattgtaaatcacaagcgatattcgacggttgcgtctatgctcaatcaatataaagatcaatttaatattgttaccgttttgatgacaacacttattttattagcatttatattctcagcttatcgtgcttggcaaatgcgccatggtcaaattcttttgcgtagatcaaaacggattgctgtattgagttggttatcattatgtatatgtatcgctttagcgctcatattatatgcattaccatatctcattctcggtagcaataattggtcttttgtactgacttggctaccaatagaaattaaattagcactaatcacaacattaattgcattattcagtacattaattgtaattctgttattccttcatacaaagataacgaagacataataaaaaagacttgttcgagccgtgcgtttgataatatatcatccacgattcgaccaagtctttattctttgtatattaaacggataaattattatttaattggattcatgccgtctttccaagttttataaatcagagtaccaccttgcgctttaaacttctcattgcttacgccacgttcaaatggttgcgcaggttgaatatcaatatttggttcaacaccaagttgttctttataccattctgcaaattcagaacctttaacaggtgcatcatctgctacattatagataccattttcaaaatgaatagcttgaatagatgtttcaactgcatcatcaagatgcacaaatgatgttacgccatctgaaagtgtcacttgaccatccataaattgattataaatcatgccatcttttccgtaccaagtacctgggccatataaccaaccaaaacgtaaaacaacgtattcatccatacgagccgtttcttcttctagaccaaccacaccatcaaccgttacttttctatcaccagttgagttaaaatcaagtgaagtttcctcatttgctaatccttcgccaggttcatacataaaggcaatactttgggcaattactttcttaacgtcatgctttttcgccgcatcaattaagtttttagaaccttcaatacgtactttcgtatttgctgccatatcaacattttttaaatccgtaatttggttgataatgatttctggtttaaaatctgctaacgcttgatcaatagtatcagcttttaatatatcaccaatatatgcttttacattaacagcagctagcttttgttgaccattctcagatgtagtaaaaccagcaacctcatgcccctcttcttttagtctttgaactaatttaatgccaataaggcccgttgcaccagttacaaaaattttactcattataaacaccttttctctatttgtctttttaatataattacttgcttgatgagtttacaaaattcacgtgagacttccaaatgatttgcctcaaaatttttcaaagtgtcgtcgtaaaaactgtctagtaaatactaatagtatgtcgtagacctatgacaaatctgaattatgacgaagatcaatcaagaaaaacagcaccaagatcatttcaatttgaaagtaccttactgctgttctttatttattacatttcaatcttaataatgaccgtaatatcacgtgattgtcatttccttgtaatcatacctaaaacaccaattaatcctgtgcgtgtcgctgactttctttagtatgaattaaatcagtaataaagcgattgactggcgcttcaatatgacgttgtttacctaatgttgcaactgcgccattaatataatcaatttcagtttttctattattaacaattaaatcttgatacatggatggataatgcgcaccaactttttcatttaaatcaactaaatattcaaatacttcatcaacatttaaatgaacattatcaatcgtcgctacatgcactatttcttgcgttaatttataaatcaaacacttcgcataactactttcattcagcgatgccatattacactccaacactgtgcttaatgcatttgccgtaccattaacacaaatctttttccaaatcgattggtataaatctttactaattacaccattcaattccgcttcgttaagtaaatcagcaacttttataacattttctttaccttcatccactagttcacctatttcaactggtccactaccaagtaaatgactgtgtccagggctttcaagacctgccgtccaagtcgtaacacctctgacaatttgtgattgagcaacatactgcgcaatgacttcttcatgcttcagaccattcatcgtacatacgacgatcgtttcattatcaatatgtggcttcatatcttccatcacttcttttaattgcattgactttggaaatagaaagacaacatcgtaaatgctttcgtccggttgatcattaaaatgatacatcggaatgtttaactcgaatgcctctccattaatcgttatatttaatccatgttgcttaaccgcttcaacatgagatgtatatccgtcaataagtgtgacatcatatcctgcttgaaatagtttggcaccaaagccactacctaatgcacccgatccagcaattgcaattttcatcctataaacccctcttcatcgttgttgttcattttaaaaatactactttcgcatattagcgtcaatttgaaaatcattcgcttaatatacacacagcttttatcgtctataaaagaacacacctaacattaaacgtcaatacgcaacattaagtgtgtatgataaacttactttcacaaaatttcctttaaaatccctacataataacttgctttcatttcagttttacaaattcgtttgatttttaggaactaatagtaaaatgactaaaaatgcaacaattgctagcaaagcattaaacatcatacctgtgaaaccacctaagttcaaatttaaattagctgctaacacagtataaaccgtaccagatactgctactccaaatgcatttcctaatgatgacgccattttatatacacctgaagcaacacccgacttatcatctggcgcactagcaactgctgtatcagttgatggtgtagcatataatcctaaaccagtaccaaacaataaatatccaactatactagatacgatataccacatttctggtaaaaatgttaacgacaataagattaacccaatcactgtaaagccacttcctagtaatagtgggcgcttcgggccatgttgagataaaatcttttcacctacacgaatcattgacaacactgctattaaatacgttaatgaaatataacccgtttgcgaagaattaaatcctaattgttgttgataatacgtgttaatgacgataagtgcaccacctgctacaccatttaataagaagtttgaaatagttgcaccactgtatcctctatttttaaaaattgaaaaatcaacaagtggatgctttattttattttcgtaatatacaaaaccaactaatgaacagataaacacaacaattaaacctagaattaacggtgaaactaaaccaaaatgagacgtctgtgtgatgattacatttaaacttaacatcgtcactactaaaatgactaacccgataacgtcaaactttttagcttctgctttcatacctttgattggttctgctttagtctcaggtgcatgtttgattaagtacattgctaataatgttaatagaattgaaacaacaaatattgaacgccaacctatatatgtagccattaagccaccaaacaacgtacaaataccactaccaccccaagaaccaatagaccaatagcttaaggcacgttgtcttcttgtaccaatataatattcgttaataatagcaagtgttgatggcataatacatgctgcagacaaaccttgaattattctacctataattaaaaatgctggcaaaggtgtaatgatgatgagtaatgaacctacaacatttaatatcaatcctacataagtaattttgacgcgaccaaatttatcagcaacatcaccagcacctacgataaacaaaccagcaaataaggcagataagctaacagcgatatttatcgttccaacgtcactactatatgttgattgtaatgggacaacaagattaacaagtgactgcgcgaatagccaaaaggtaataacccctaaaacgatacccaaaagcaatcggttgtcacctctaaattgttttgatgtgtccatgaattagataagcctcctatgtttaagaaaaacaaatttttaatatgatatattaagaaacaatatcataaatttgcagaaaattataaataaaacatctcattttttagcatttttacaataattaacgctttttatccaaaaactttcatgataataattgctattttagtgtaaacgcatacaaacacaacctataaaaaggctactcaaagattatttgagctccttgagtagcctcattttttataaatcatgaaacgaaatcgctaaattataaacatcttctactattacatattaatactttgcggccgatgattagattgatttttacgatgtcgtgttgttgggtctaatcgtttttctaaaaatcttaatagtacatcaatgacgattgcaatgatagcaatcggaatcgcacctgctaaaataaacgttgtgccatccgtcgcatttgtaccacgaatcacaatgtcaccaagcgtaggtgctcctataaatgatccaacggcaacaacacctatcgcaacaaccaaggcaatacgaatgccaccgataataaccgaaacagataacggtaattcaatcattcgtagcacttgattgcgtgtcattcccatacctttgccagcatccttaatattcgcatcaacactagctataccagtataagtgttttttataattggaagtaacgcatataaaaacactgttaaaactactgtttctgaacctaagcccatgactaacattaaaatagctaacattgcaatgactggaactgtttgaattatatttgcaattgtaattacaaatccagaaagttttgtgtatcttgcaagcaagattcccaatggaataccaattaaagctgcaaacagcacaccatagacagacattaataagtgtttgaaaaataaatcccatagataaccaaagttcgtaacataataattgaataattgctgtaataaattaccttccattacttatgaccacctttctgtttatcaaaatagtggtgttttttcaaaaattcttctgcgacgacagcaggttctttacctttaccatccgcttcataattcaagcgttgcatctctgaagtcgaaatctttcctgtcaacttattaatcgtcgttttaagttctgggtgttgccgtaataattcatttgttgcaacagcactcgcagcataaggtgggaaaaattgtttatcatctttaagtactttcaaatcatacgcggcaattcgaccatctgtagaataacctaatgcaacgtctaacttctctgagtttaatgcgtcgtagactagacctatttgcattggtctcactgtaccaaagtcaaaaccatactcttttttaaatccttcatagccatcgcctttacgattcatccatgaactatccatacctaaacgtaaatctttactatgctttgctaaatctgaaactgtctctaaatgatattttttagcggtttccttcgttaccatgaatgcatacgtattcgcaaaaccatacgaatcaaaaaacgtttgatcaaatttctttttaaatccttgttgtgttgctatcattgctttcttaggatttttaattggtgcttccttcaaagctcccgttaaatctgtgccattatatctaacacctgatatattagcatccccattaattaaggcattatgttgaatcgtacttgaccctaaattatttactaatgttggctttatcttaccgtgtgtatcatgctctattaacaaccgtaacatatgtgaaataatttgcgattcgcttgttgataatgctgtaattttgacatcatttttcgtgctcttactacctagtccgggcaaactacatccagataatacggtaagcgataagacaaacacgacaagtatatatttaattttcttcattatcttagcctcctaattatccagatacttttaagcctttgggaactacccatttttcaactaaagctaataaggcatcaacacctaatgctagtgcagtaacgagtaccgttgcagttacaatcatcagtggatcatataaatttaaaccattgaaaatgaaatcacctaatccacccgcacctacataacttgcaagtgtagcccaactaattacatacacagatgacaaacgaatgccaccaatgataagcggcaatgctaacggcaattcaacatccttcatcaattgaaattgtgtcattcccatactttttccagcttctttaatgttgctatcaatattttgaacaccgagtaccgtgttatttaaaataggtaataatacataaataaatagcgctacaattgcaggcgttttaccaacaccaaaaattggtatcataatagcaagtacagctagtgttggaatagtttgtaagacacctgccacagttaatacaatattggcagttcgctttgtttttgataataaaatgcctataggtactgcaacaatgatggcaagtaataatgcaactatagaaatatagaaatgttccagtgttttcgacatcaactgtccaccatgttcatgtaggaactcaatcatgatttatcatctcctatgtcacgtactttgacattagtagtgtgttgctcatgcacttttgaggacgcagtgtcttcccccacatgttctgcttgcactgtattctcactatcgccccaaatcgtgtcatatacaatatcaacaacattggcacgcgtaatcagtcctactaaacgctgttgatcatctacgacaggtacattcctaacgtttctttttaaaatcgtacgtacagaatcttgtaatttagaatcaatttgaacggtgtaaatatgttgttgcatggtatctcgtaaacttttgtgtccacgtataccctgatttatatcttcaatatctaagaatccaagtaaatggttgtcactatcaacgacaaaaatcgtatctacacgcttttgtctcataatatgaacagcatcattaagcgttgcatctgcctgtatcgtgattggtttaatcattacaccttctacagtcttgtcattgggacggtcttgaatcagtctattttgtcctataaaatcacgtacaaaatcatttgcgggatgtcttaaaatattgtctggtgtatcaaattgcaccaccttaccttctgacataatacaaattttgtctgctaatttaatcgcttcatccatatcatgtgttacaaagataaacgtcttgcctaattttcgttgtaacgttttaactaaatcttgtaacgtatctctcgtaataggatccaatgcaccaaaaggttcatccattaaaataatatcttgttcggccgcaagtgctcttacgacaccgatacgttgttgttgcccacctgatagttctgctggataacgctctaaaaatgactccggtaaatccacaagtttaattaattcctttgcacgtttatccttttcttctttagtccatttcaacaatttgggtaccaatacaatattctctttaatcgtcatatgaggcattaacccaatttgttgaataacataaccaatatttctacgtaattcgacaggattcatactccgaacatctttaccatcaatttcaatttgtccttctgtcgcttcaatcatacggtttatcattcttaaagcagttgttttaccacttccactggttccaataaatgcgataaattccccagattgaatatctaaagagatgtcatctactgcctttttattactagaataaattttcgttaaatgcttaatacttaacataatcatttctccttcctcataaaaaatatgacgaatgatacgcataaaataaaaagaccattatcgcaattgttaaacaaatagagtcataagttaaacaagtacacatcatggtcttgattatgtagaattttatatttttcatctgtaatgtgaatacttaacagtaaacggcgctatgtatgttgaatttctaccgattactttgtttgcacattcgtatattcgacatttaaaactaacatactctatatgatgttattaaacattattattttatctttggcaactaaatagataactcatattttttaaaagcgaatttattatcgctcaattggttgttttatagcaaaaaagtgtcgaaaatgtgaaatattattacaaaagtcgaatttttgtaataatgcacacgcatccattgttacagacggacaaacgtccatcagccactcacaaagtcatccttatattttaatattttcatcattcattgtagacacccttgccttttgctaacagttcctactcccaagcctgtaacggaattccaacgtcaaagtgttgcccatgacaggcacacctaaaaaaacaaccaacagcatgagccattggttgtttcgtgtcatcttgtatgttgttgtataaccggtatgcttttactcattaattacttgtcatgcatccctttaccttctagtatttggttaatatacttttcaacacgcttttgtcttgtttcactgcgtttagcttgtccaatatgatatatatattgatgttgtctgcctggcgttaatttataaaatgaagactctaactgtggcatttcttcgaacttagcttctaactctttaggaataacatattcctctgttttcttcatttcaacttttttaccagctttttcagctttaattgcttcggctagataatatttaatttcttcggtacgtgcttgaatctctgttaaattttcaaatcgtaactgacgagctgcttgcaccttttcagtctgttgaatgagtgtatgatatttatcctccaaaatggcacctttatgaaataatagtgcaacataatttttgaagccatggataagtactacatttttattattcaacgtgtaacaaggatgcatccatttatacgcttcctctaattctgtttcattaaagattaacgctctcaaatatttatattcttcttgccattgactctctttatttaaaaatgcttcaacttgttcatttgattgtttctcactcatagtcatcacttccattttgtttttcaatacacattgtattatatatcctaattttataaaaaactaattttacaaatgcttttgcgttcttacaaaaaatgcatttgactattattataataagcgtataattgtcgcatattattttttgtatttttggcaataacgaaggagtatttatgaataaagacaagcaattgcacaacgacaaaatcaatctatcccaattagtcttattagggttaggctctttaataggatctggttggctatttggtgcgtgggaagcatcatcaatagctggaccagcagcaatcatatcatgggttcttggattcctagtcattggaaccattgcctataactacattgaaatcggcacaatgtttcctcaatcaggtggcatgagtaactatgcccagtatacacatggctcattattaggctttattgctgcttgggcgaattgggtgtctttggtgacaataatacctatcgaagctgtgtcagctgttcaatatatgagttcttggccgtggcattgggcgaaaccaatgagatatttaatggaaaatggctctattagcacatacggattgctagctgtatatctcatcattgttattttttcattattaaactattggtccgtaaaacttttaacatcatttacgagtttaatttctgtatttaaattaggcgtacccatgttaaccatcatcatgttgatgttatcaggattcgacacttcaaattacggccattcggcaagcacatttatgccttacggaagtgcaccgatttttgctgcaacaacagcatcagggattattttttcattcaattcattccagacaattattaatatgggttcagaaattaaaaatcctgaaaaaaatatcgcaagaggcatcgctatttcactgtcaatcagtgcagtgttgtacatcattttacaaagtacgtttatcacttctatgcctcaatcaatgttacaacatagtggatggaatggcatcaacttcaattcaccatttgctgatttagctatcttattaggaattaattggctcgcaattttactatatattgaagcttttgtatcaccattcggtactggcgtgtcatttgtcgccgttacaggtcgagttttacgagcaatggagaaaaatggacatatccctaaatttcttgggaagatgaatgaaaaatatcatatcccccgtgtagcaatcatctttaatgccatcattagtatgattatggttacgttatttagagattggggtacgctagcagcagttatttctactgcaactttagtagcctatttaactggcccaacgacagcgattgcattaagaaaaatgggaccaacaatgactcgtccatttagagcaaaaattttaaaagtaatggcaccattatcatttgtattagcttcattagctatatattgggcaatgtggccaacaacggctgaagttattttaatcattatacttggattaccaatctacttcttctatgaatatcgtatgaattggcgtaatacaaagaaacaaattggtggtagcttatggattattgtatatttaatcgtgctatcaatactgtcatttataggaagcaaagaatttaaaggcttaaatatgattcactatccatttgactttatcgttattattattgtggcgcttatattctattacatcggtacaacgagttcatttgaaagcgtctatttccgtcgcgcaacacgaatcaatacgaagatgcgtgagtcactaaataatgaatcaaagtcatctcattaaatattttaaaatacagtgccatatatgatttcaacacacacattaaccaaccattgatttcaacatcttggttggttttttattttgaaaatcggttataaataactaacataacaagatgatgatcaggctgggacataaatcaatgttctatgctctacgaagttatattggcagtagttgactgaacgaaaatgcgcttgtaacaagcttttttcgattctagtcaggggccccaacacagagaatttcgaaaagaaattctacagacaatgcaagttggggtgggacgacgataaagaaatactttttctatagaaattagtatttcttatgcatgagttttactcatgtattcctatttttaagtacacattagctgtggctaatgtgtaagaaccactacataataaattattagtggctctttatcatttctgtcccactcccgtagaagaacatcatataatgctgaaaatggtttgagttaaaacagatatcaagctcgtctgattcagtcacaaaattgtcttgttatacttgtcacctatcatctatagaccgtggtatgattaaattggggatgataaaggaggttaataaatatgaagattaatactacaggtggtcaaattcatggtattacacaagatggtttagatatcttcttaggcattccttatgcagaaccaccagttcatgacaatcgctttaaacattctacgttaaaaacacaatggtcagagccaattgatgcaactgaaatacaacccatcccaccgcaaccagacaacaaattagaagattttttctcctcacaatctacaacttttactgaacatgaagactgtttatatctaaatatttggaaacaacataatgatcagacgaagaaacctgtcatcatttacttttatggtggtagttttgaaaatggtcatggtacagccgaactctatcaaccggcacatttagtacaaaataacgacattatcgttattacatgcaattatcgtttaggcgcattaggatatttagactggtcatattttaataaagattttcattccaataatggcctttcagatcaaatcaatgtcataaaatgggtgcatcaatttattgaatccttcggtggcgacgctaataacattactttaatgggtcagtctgcaggcagtatgagcattttgactttacttaaaatacctgacattgagccatacttccataaagtcgttctactaagtggcgcactacgattagacacccttgagagtgcacgcaataaagcacaacatttccaaaaaatgatgctcgattatttagatacagatgatgttacatcattatcgacagatgatattcttatgctgatggcgaagctaaaacaatctcgaggaccttctaaagggcttgatttaatatatgcgcctattaaaacagattatatacaaaatgattatccaacaacgaaaccaatttttgcatgttatacaaaagatgaaggcgatatttatattactagtgaacagaaaaaattatcgccgcaacgctttatcgacattatggaattaaatgatattcctttaaaatacgaagatgttcagactgcgaagcaacaatctttagcgattacacattgttatttcaaacagccgatgaagcaatttttacaacaacttaatatacaagattcaaacgcacaactatggcttgctgaatttgcatggcatgatacttctagcgcacactatcgcagtgcttaccatattctagatatggtattttggttcggaaacttacaaatattagcagcacatcaatatccaacaactgctcaccttaaatttttaagtcgacaaatgcaaaatgatttagctaattttgctaaaagcggtaaaatgccttggccgatgtatcataatgaacgtcgctattatcgcacatatcaataacgttatcgcatctaaaaaagcacacctgaatttgatagcaggcgtgcttttcatatgagaattatgatgatttaaatgttttagcataatgattatttttcaatgtgaaaacaacgattaatcctaatgcgccaatgatggcactcgtatacgtgatagcttgaacagaaacatgtgtcatgaccaagcctccaataatgccgccaacaccaataccagcgtttaaactagacatgttccaactcattacttggcttgtgtcgccttcaacatgttgaatcacaccgctttgcactgctggattagtactccattgcatgatattccaaataaatagtcctgctaacaatagacctgaaccaggtaagattaaattcataagtaacatcatgacgataaaaatagaaacagaaatcattaaccaacgcttacttgtaattttatcggagaatataccacccaatgatgttccaataacgccagcgattccatttactagaagtgctaatgaaacgaatgacatatcatgaccattagataaaataagtggatttataaagacgaatgtcactgagtttgcaatcaatactaaaaacgtaataattaaatattttgctacttcagcaggtcttaatattttcgaagtaacatgattttcatgagatggtgcctcatgattcacagggcctcgttgtatttcctgatccttcggtaaatagatcatcatcaagaagccaacaataatactcacaataattaagaatagaaatgtatagcgccaacctactaaatcgccgataaccgttccaattggtacaccaaaaacattggccccactaaaccctgtatagacaagtccaatcattttaccacgatttttaggtgctgataacatcgctgtaatagctaatacttttacgataattagtgctgctgctgcagatgagataattctaccaactactaatattgaaaaatttggtgctacagcaataatgccattaccaatgataaatataagtaatgtccataataatacaggccttgatgaaaaacggttcgttaatttaaccagaataggtccacatatcgcaaatgttaaagcgtacattgtcactaattgaccaacgacagcttctgatacatgtaagtcctgactcatcaagttcataattcctgcaaccatcatttcaaccattcctacgataaaaatacttaaaatgaatgtaaatagtcgcatgattgacattttaaaactcctttcaaacaaaatttccgatattcatttcccttagaataacgatttattaaaaaatgtgtgcaacacaattttatatataaccgttctattatataatattttgctttaattttctgtgcttaattggaaaattattgaaattgtttttcagtatttgaaaaattaacacaagtatgtcatttaataattatgtataattacttcagtttcaacaatgtctccaaaaaagcacgcacgctttatatgtcagaacagataactgactacaaagtatgcgtgcctttatgaatattttcgctgtgttaatgaatagcgatactatatgtgcgcgtcacttcatttccaattaaaactaatgcctaaatctgatgcagtaaaatctatcatgattcactcttaacatcagtatttcgtgctactaattgatgtcttgcattgaaaaattgaccatagcttaaatatgtcgcaatcaaagcagacataatggtcgcagttgtatgaataaacacgactaacaattgaaatttaatcgcttgtaaaggtggtacgccaccaataattaagcctgtcatcataccaggaatcgacacaagcccatatgttttaaccgaatcaattgttggcactatagctaaacgaatactttcacgtattgcacctttagaagccaatttaggtgtagctgcaagtgataatttagattcaatattagtaccatcttgtacgaatgcacgatctaaattctggtaagctaaattaattgcaatcaagccattattagcaagcatgccgccaataggtataacttcattggctgtaaattgaatggcccctgtcgcaatagtacctgcaagcggtaatgccgttccaatgaagatagctagaaatgatatccaaaacacatgatgcatcactggtgatgctcgactaattgtattccatgatgcattaataataatgaccaatacacataaaataagcagccatttatcgtttattttaaaaatataatgcagcaaaaatcccaaaatgattaattgcacaactgcgcgtaatgtcgcaacaattaaatctttaataatatgtaaaccttctttatatgaaatgataatcggaatgactaaaagcaatgccgtcaatccaagtgccgtgttactcatgttgattcaactcctcaaccttagaaattttgccatcaacaatcgttatgcgcttttgaaaatgtctcatactttgatcatcactatgggtaatccacatgatagcaacatcctgttccactaacttaaaaatgatattttctatcttttctttattatgaacgtctaatgcactggtcgattcatctaataaaagaatatccggtgtatacatcagttggcgcgctatagcaattctttgccgctcaccacccgacatattttccacttccgaacttaattgataatgtcccaaaccgacatctttaattaattgctttgcacgttttctatcaaatttatcattacgtgcaagtgatgggaatatcatgttatcttcaatcgtttcaccaaacaagtcactttgctgcatcaaataactgattcgttgacgcaattcttccgggtcataatcattatagggtttacctttaaaataaagttctccactagttggactaatcaaattacatatttgcttttgaaatgtacttttaccactacctgatggacctataatggcaatactctcgcctttatctacttttagactgatatgatctagtatgattctatcgctcgctttatacactaaatctttaatttctaacaacatttgcaccgctcctcatgtaatatatcaggtatattattcccgtttttttggtttttagtgcaattacatttaagaaaaaatcattttcttgtaatatcaaaatttaggcataattgattttcagcatttaaattaaaaacaaaaaatcctattaacatggatactgtctaatgactaagaattaaagttagacaattgtttaacaacctaccatattaaaaggattctttattatttatggatttgattaccacatgatatttttataactttcatcattcaatgaacggacaatttcagtaacaagacggatagaattttcataatcatctacattgagcactgaaacattagaatgcatgtatcgcagcgtaacaccgattgtcatcgttggaataccttcatttgcgacatgaatacttcccgcatctgtacctccacctggtgtcgtatcccattgtacttcgatgttatgttccttagctacatctttaatatgcttacgcaaaccttggtgagcaatacttgtagcatccatcataatgacaactggaccaccgcctagtttactatcgctcgtttgacctgacatacctggggtatcataagcaatacctacatcgacagctatcgccaaatctggtttaattgtattcgctgccactttcgcaccacgcaaaccaacttcttcttgcactgtggcaccactgtataagttaatgccaatattttcatcttttaaacgttttaatacctcaacagctaatgcacagccatagcgattatcaaatgctttcgcagttaaatatttatcatttgcaagcacttcaaattcactatatggcgtaaccatattgcctacttcaacgccagcttcttcagcttcttccttgctactaacaccaatatctataaacatatttttgatttccattggctttttacgttcttcaggcgttaagacatgtggcggtttagaaccgatgatacctctaatttctttgcccgaatctgttgtaatcgttactttttgagataacatgacttgattccaccatccaccaactggcgtaaatgaaataaaaccatgtttatcaatctttgttaccataaaaccaacttcatccatatgaccagaaatcataattgagtattgaccattctcagcatttttctttccaaaaatgccacccaagttatcttcaataatttgatcactgacaggctctatatagttacgcattgcttctttaacttgcatttcataaccagcaatgccgtttacatctgttaaatgtttaagtaatttgactgactgattcatgttattcatcctcctgtatttcaacttaaaactattgtatcactaactttcagaaaaacgttccctaccgctttatcattttcaggcttaaatatttttaaaattttgtgaggaatccgcttaaaaaaactcatatttctaaaatttaatattccgaaaaagtcacaatttaaaattccttattataatacgttattcttttattgttactaatttcaatctgtttagtcttgcgctattataaaattaaaaagtgtagagataacaacgcattaacgtcgctattttccctacacttaaatactagtttctttaattaacttatcattaaagttattcagatattgaatattcattaatcataatgtgaccatgccgatagtattaatactactttatttcgatcatctatggtatagacgaccctgtgctgaaggttaattcttcttgaatatcgctctaaatatttaggttctaatttttcaaaggattgtgttattttataaggatcattttttaaagtctcaacaatttctataaatgtcttctttaaataaggatgttttattttctttaaatctgatttcgctgaatttttaatcttaaccgtgtaattgctcattaaagattatcccaatcaatatcatctatatttgttgtaccactactatctttttctctttctcttactttgtccattgtaccagtagatacaagatacattgtctcttgtatacttttccaatcttctaaacctataatcacagcattattttcggcattattaccactaatataaattggttcgtgattattattaacattttttagtaattgataaaaatcttttctcgcttctgtagggctagtgataatcatataaatcctcctttgtcttctgttacgctaattatggcgtacgtatttaagtacgtcaatattaccaacgagttcatcgtattcttaatacctatatgctatcgttcacaaacttttgttcttttcttccaacataccgcctataatgctcaaaaagaaatcagcagcggaacacactacgttccctaccgctttatcattttcaggcttaaatatttttaaaattttgtgaggaatccgcttaaaaaaactcatatcttcaaaaaaaatgacaaaatttaaatttttgaataacatcattttttagtaaatgttataatttctttataatacaaatatcgaaagaaggcgactgactttgaaaaaattatgttcattaattgtagtagcattagtttgtgtcattgcattatcagcttgtggtaaagaacaaaccaaaacatatgaaggtgatgttagtggtaaacatgtactaacttctatcacatataaagatgataaagttttaaaacagtctacaatcaacacaattaaatatgacgatctaggtatggataaagacgaagccaaaaagttattcgccaaatctgaaagtattttcaaagaccttaaaggcgtaaaatacaaagtagactataaagataaaaaagcaattgaacacttagacatagattacacagaagttgacatgaaaaaattaaataaacgtcttggtgtttcgactaaagaaaataaagatattagttttgaaaaacttgaaaagcaattaaagcacagaggtttaaaagaaaaagataaaatggacgacaaatagtttataacataaaaatgccctcagataagactaaggttacaaaccttaattcatattctgagggctttaatatttgaaattcttctgtgaccagcatccactactaatataaaattatttgcagtaacgctaaaatccgctgctttcaatttcccgaaataaataagttaactaatgagttttaatttataatcatgtatcgtttgcaattcaccatcgacttttcgatatacaatatgatcagcagtaatttctgtaggactggatacgccaacagctgctgcaatattgaataagccttcatgcaaacttgttacatagtttgtgacacgatattgcttttctccaacaatcaatgctttttcttttttcgcatctgtcgttgcaacacctacaggacatgtattcatatgacattgttgactcataatacaaccgacactaatcatcatgccacgtgcaatattaacaaaatctgcacctaaacctagtgcaatcgcaattttatctggtgtcactaacttaccagatgccgccaatttcactttatctcgaataccatatttttctaacatgccagacacaataggtagagctgtaaatagcggtaagccaacaccatcttgtaattcttggaatgttgcaccagtaccaccttcaccaccatcaatcgtaataaagcttggatacttatctagttccaccatcgtacgtacaagtgtttcaatttctgaaactttgcttactacaattttgaatcctactggtttttgacctaattgctgcaactgatcgacgaaacgaatcaaatcttcagcattatgaataaattcgtaacggttaggtgaattgattgttttataaggttcaacatttcggattttagcaatttcttcgtttaccttttcagcttccatatgaccaccacgagtcttagcaccttgtgccaacttcagctcaaatgcgcgtacgttagataactgtgcgacctctttaaataaaccttcactaaaattaccttctttatcacgaacaccaaataaaccgggaccaatttggaaaatgatatccccattaccttttaaatgatattctgataagccaccttcacctgtattcatccaagtgcccgctttagctagacctttagataaagctgtaatggcattttttcctaaagcgccataactcataccagattgtcctacgatacgttttaaaataaatggatgttttaaatgttcacctaattttattgcatggtcatcacttaagtaatacggatcaatctttgtcggtacacgatattcttcacgactaaatagacgctcattcgcgattttataaatgaatgttgataacaatgttgtattatctactgaaatctcattacgttgcatcggaaacattgtgttctgtatgtaaaagccgtcttgataatctttagtagtaccgaagctggtcatacgagagttatattttccagccaaaacgatatttttataatcattacgtgaaaaaggtttcccttcattatccccagaaaataaatactgacgtaattccggtcccattttttctgaaatatatctaatacgtgctagtaaaggataattccttaatacactatgttgtgattgtcttttatctttaattaaccaaataagcccgataacaataaccgtaagcatgaagcctacaacgataatgttaactataaattgcatgactgtaagaaacgtcattacaatacctccccccaaaatttcaattcaatatttatgatacaccttacaaaataaaacacaatggaagcgcttcattttataaaacaattttatgatatgtttttcattttaaattttaatgtataaaacatacaatacaaagtaatatgtgctaaagtatctatataatacaactatttaagaggtatactatgtcaaatacaaataaacattacatagaagaagaatacgctaccgaacaatcgcgttttttcaaacgtgatattggatttattttcctttatatatttttggttaacatcttgccaatcattatcgtctttttaacttttgggttagtagctgtattcactcaacaagccccatggggtttctcttttcctatttcaatgaacattagctatatactcgcagttattatttcactagctatttttcgtcggatgcatgaagatgcatttgttccgatgatacgtacgcaaatcattgccagcaccaaatataaatggcatattcttatatcatttacactaagtgtcgtactctttttacttttaaattatttcgatattttcgcactaaatgtagatgcctttactgtctttgacatttacccgctcattagagattatggttccatcagtttaatagtaatgttgtggttaaccattatattaaatactttaatttgtcaacttattttccgtcatattttaattcaagaattaagcagaatcatgcctttaaagattacaatagtattgtccattatccttgaaactctgttctactatccatacattaatacatggtgggaattcattccagcattgatactagcaagtagtgcgacttacttatatttaaaatcaaatcgtaattttatggtgagctatttttctcaattagcagttatactcgttttgcatattttcatgtaaaatttttcagagtattatccattatccattatccatacacatcaaaaagcacacttaaaagtcagtatcacaactcacttttaagcgtgctttatttagatatactgtcgttctaaaaacgagccatatagaatgtttcatgtcctagcatgaagcatatgaatcgccatgctcaatataccttttaaaatttaaatatttattaacttaatatgctttaattcacttcattaaagactatttgctgggcgtggtgttggttttttcaataaactcataatcattattacaatgactaacataccacaaattagatacatccatttaaatcctactaaatcggaaataggtcccatcaatgcgccacctaacgatatacctaagtctgcacaggcaataaataaacctaacaacatattacgacctacttttggtaagacgaaacttaagtatgatgttaatgttggatacaccattgcttgtgtcattcctattaatattgcactaccatagaaaataattgcacctacttgcggaccaaatgccactacaaatgacgcgatcactaataatgatagtacagataccatatatttaggatgccacataccatctgatggaatgtatttccttaagtaaaatcttgccgcaacaactgcgatggcctgtattgtcaaaaagattcccgcattcgcgaatcctaaactcactgtgtataacggtacaaatgtactaactgcaccaaatacaatcgatgcaacaatcatgataataccactgttcaacaactctttatttttgaaaaattgcgcaaaaacagttacagcgttaaacggcattttttcaatcttatctgacgtatcgggttcctgttcagcaaaggtcacgcgatagccaaagaatgttgttgttaatgcgataaagataatgacaattgcaaatagtgaaatattatttgcattccaaatacctacggcaactaatggtccgattaagtttggaatcgttgaaaatagcgagtacaatgatacaccttcagaacgatgttcctctggtaatgcatcaataatacctagctgtaaagacatagaaaagaatgccgtacacacaccttgcataacacgtgctacgaaataaccttctaagccagtaaaaccataaataattaaagctatggcattgataatcaaaataattcttaatactttaatgggaccgacacgagcaataatttgtcctgcccatggtcgaaataccattgctgttaacatgtatgcccccataacgataccgataaccgtattcgttgcgcctaaatcatgccctcgtaaaggtataaacacgtttaagattgcattggcactaaagaacatcaatgttaatatatataatctcaaaaagggccaagccattgcacctttcattatctcactccttagaatgatagttgtttttctattaattctcttgtataagcattgtcacttttatgcaatgcgcttgtcggaatttgttcttctatttttccgtttttaaaaataattaattgatcacataaatacgtggcagcttgaatatcatgtgtgataaaaatataactcaactgacgcgtttcacgtaaatgaatcaataaatctaatatttgtgtttgaattgacatgtcgagtgaactaatggcttcatcaaacaaaatatatttagggttaatacatattgcacgcgcaatcgcaacacgctgcgcctctccacctgataacatattaggatatttatccatgtatgccttagatagaccgacttcttccaacaatgtaattgcttgaacttccataacatctttaggttgtccatcacattgacacatcacttcaaataagatttctctaacagtctgaaatggatgtaatgatgacgtataatcttgaaatacagcaccaatttgatgacgtctcactttcttcttatgcatcggttgatcatttaaggttacacaacctttatccggtttctcaatacctaatatcatacgactcaacgtcgatttaccgctaccactttctccgataatcgcaatcgtcgcaccgattggacactcaaatgacacacctttcacgataggtgttcgacgacgcttaaaaacatgtgcgctttgatatgacttttcaacatctttaattttaatcatgtacatcacccctcatcacatgtttaaaatgatcattaatcttcttcttggttgataataaatacttcgtataaacatgttctggatgatgcaagactgattcacgtgtcccttgttcaataagctgaccatttttcatcacaacaacacggtctgcaatcttgttaataaccgttaaatcatgtgaaatgaaaatcatcgcacagtcaaagtgttttttaatatctataaatgcttccagtacatcatattgtgtaattgtatctaaagccgttgtcggctcatcagcaatgattaactttggtttcaaagctaacgctaaagcaatcatcaatcgctgtaacattcctcctgataacatgtaagggtatgattttaatatacgtttaggatctttcaaacttaaataatccatatattcaatcaatgtcttttcaatttcttgtgtagacattgacgtatgtactttcatagtctcaaacatttgtttaccgacagtagttgatgggtcaaaggcacgactaccttgttgcatgaccatcgcaatatctttaccacggtattttttcaattgtgcttccgataacgacaacattgatgtaccatcaaagataatttcacctgtcaccccgagtcgttcgggattcaaaccaataatcgacttacaagtgattgatttaccgctaccactttctccaataacgcctaaagtttcacccttagttaatgtaaaattcacatcactcacgagtggttgatctgtccaggtatctgtaatcgtcaaatgtttaactgttaacaatgtcatgattgcaccactccttttttcacagaacgaagtttatctttagaagagatgcggggatcaatggcaatttgtaaagcatcggataagaagttaaatgccatcactataatcactatggcaatacctggcgcaaacatcatttcaggatgtgtaaacatcacttttctagcttcgttaagcatcatgccccactctgcagtaggcgctttgacacctaatcctaaaaatgaaaagccagatatttgcaagatcattgaacacatcgagctactagagataatagcaatatctgctaatgttaacggcataatatgtttgtgaataattttcatatctttcataccgattgttttagcaaatctgacatggtcagaagcagtgtactgcataacacttgtacgtataacacgacagaaccatgcccaacgcgtcaaaataaatgccatgataatattttcggcacccataccaaacaatgcaattaatgctaacgttacaacataacttgggaatgccaacataacatcacacgcacgcatgattaaggcgtcaacaaacccttggaaatatcctgataagaatcctaaaatagatccaataagtacagaaacaaatagcgcaacaaagacatataacaaacttggtctaatcgcataaattaacctagttaaaatatctctacctaaatggtcagtacctagtagatgttgaaaactcatgccagcaaatttgtttgctgtatcgatatggttaggatcataaaatgtcacaagtggtgctgctaatcctaaaaagacatataatacaataatgcctaaagcaatcactgcacctttatcttgtaataatcgttttaaaattatcatcgtgcgccctcccttaatcttggatttaatagcgcattaatgatatctgctaatgtattaaatacaataaataataccgctacaattaatacatatgcttgaatgactggaaaatcatgttcaagtattgcttttaaacttaattgacctagtccaggccatgcaaagatatactcgataacaactagtccacccattatcattggtatagacatacaaaagattgataccgcaacttgtaaagcattacgcaacacatgcaacattaatgtgatagatttcacaccgcttgctcttaaataaagtacataatcttcatttaattgttccaccatcgagcgtctaacatttctaaagtaaataccagcataggcaatcgtaataacgatcactggcaatatgtaactttctggacctgttaatccagaagtcggcaatatgtttaacttcactgaaacgtaaataataagtattgaagctatccaatatgatggtaatgcagttagaaagaaagccactgaacgtatcgcacgatcagtgaactttcctctttttaatgcactaactacacctaaaataattgatgtaatcatcaccataacacttgaaattattgttaatttcaatgtattcataaatgctggaccaatacgttcagcaactgggtcacctgtaatgtagcttgtaccaaaattaaattgcatcgcttcaagtaaccaatttttatattgaattaataatggatcattgaaaccgtacttctcattcgtttctgcaatcaactctggtgttacatttggcgttccttgtgcatgtaaaattgtcacagctggattttcatttgtaatatacgtcaatagaaatgtcataaaacttactacaatcactaatggaaacatgagcgcaatacgttttaagataaatttgaacatctaattgctcctttatttatactgcatttcattgaatggtaattcatactgtgattgtgtgaatgatactttttctaaatctttcggcgcaacaactgtcatactaccgtgtgaaatagggataaagataccttcatcatcaatttgtttcaaaatgtttttataagcgtctgaacgctctttaccgttttggattttaaatgcgtcatcaatgctgttgtatattttatctttgttctcaatgcctgatgttgcactttcataaccatttttcgctttaaatgctgcaatagtactttgtggatcgtacaataatccccaagtttggttgaacattaagtcataatcaccagaagtacgacgttcagcaattttatctgatgtttcgccattgatgtttaacttaatacccattttcttaaattctgcttgtaagtattctgcttgttctttttgacttgaagaacctttgtcatagtacattgccatttcaaggtttttaccatctttttgacgaacatcgctgtctttacctttcttccaaccagcttcatctaataatgattctgcttttttaaggtcatacttacgtgttggcatatcgaaattaatatctgttacatttttcgcaaataattgagttgctggtttttcttgaccatctaaaatttctttggcaattttatctctgtttaccatatgaccaatcgcttgtctgactgttttgtcactcacagcgttatcttttttaccagaattgacaactaacattttcgtattcataggttgactacgcttaacttgatagtcacctgtatctttcaattgttttaaagagtctttgtctaagctatctgtacctctatcatctgtgaaggcaaagttcgtttcaccttttttcattgataggaatgctgtttcaccagcaggcattacttttgcttgtactttgttaagtttagacttttcgccccagtattgatcatttttgttaaagtctgcagactcatcttttttgtgttcacctaatttaaatggaccagtaccatcgaactttttaacgccatcttttgttgtaccgtttttaaagtcttttggagacacaaatacatatggacgaggcatcgctaattcagccaatgcaggttgatatgcttctttcaaattcaattcaaccgtgtacttatctttaactttaacattgtcaattaatgttgaaatctttaaccaagaatgcaattttttattttgttgaaccgcatcaatatttttcttaactgcgtcagcatcaaatggtgtaccatcatggaatttaacgtcatctctcaaatggaatgtatatgtcttcccatcttcagacacatcccattttttagctagtaaaggcttaattccatctttcgtgttacgtacaagcggctcgtatatcatactttcagcagacatcgatccaccgtaaacatgcggattcatatcaccgatatctttaaccgtcgtatacgttaattgcttgttttcttttttctcctctaaacctttattaccgccacaaccagttaaaattagccctgatgcaagtaacattgcactcattttagttagttttctcatttgcttttcctctttctaaattgataagttgcattacttaatcaaatcgtaatgattatttttctcaattatttgcttatttttatgtaaatgtcaaacataattcaataatttttttctattataaaacttcaaacccttattgtgaaagcgttctattgatttccaaaaattttgtgacgagtgctttatctccttcaaatagatttgtattaaattgagaagataagtgttgatcttgatgcatatccttgtacgcctggcaacttgcttcatagcgagttaggaactgatcaatcattggcgttttgatacctagcattttcccaatatgctgaatcatcgccgttctgtaataatcttcacttggcattcttggaatttgaacaacatcctgttcatttttatagacttgcttaaatggtacagctgaaaaatcaaagtaatgtccgttttcgtctggctgtgaaaatggatcaatgaggattgcggtatatcttacataaagcagatattcttgtaagatatctggcaagatttcgaaatgctcaatatcaccttcatccaaagtttcaggacgtactggataattttccttcaccataaattgaagcaggttgactgacggcactctaaatgcttgtaaaatagccatcatttccttccacattaaacgcatttcacggattagtgtcatcgttatcggtccttcaggaaataacttatacacataaaccggtacatccgtcccttcgaaaatggctttcaatgaaaagtcattcataaatagtggtgggtgcacataaagcgaactgtttcgcgtttcagcgtgcagtggcgattcaacgacttctaattgaatcttcaattgctcagctaaagcagagattcgttgacacattgttgagtttgaatgtgtcgatcccatgtacaatttcttttttacacctgttgtcaacacatgattaggcgcttctttatcaacaatacgtgtatcgccaagataagttgaaaatgaaatcacttcgatatcctgactgaacttagacataaattgttccacaatcatttgcgatccaaatgtcggtgaaattaaaatgacatgtttgacactttgcaaagtttctaacgacaattgctgtagtgtgtcataataagcatctgctgtgcatgccatgacaaccgtttcgtattcacccttaacgtttttaacatctttatacaaacgattaatttcaaacttaccttccagatgttgatgcgcctcgttttgtattttgacttcaaattgtttctcttttttatacgcttgatataagcgttttgatttttctgatgttgaggcacgtccaaccatatcaatctcataatctgattttaaatagcaaatattcgctaattggattgcgaccggaccagtgcctatcattaataatttagacatccgtaatacctacctttatagctgcttttttataaagtgctatatcaaaaatttgctgtggtctcatatgtttattcacacattgccacttatcttccgctgtttcttgtgacggataattaaatattgctttgatgccatcaccaaagcgcattgcaactacgacattttcatttgttaaatcatataattcttctaaaatgctgtactttaaaggaattgtcgagctgaatatgatatgcgtcacatctttgatatctttaagttcagataccttttgatccgtaattgttatatcttcatttggtgctaagacgttaacgattctgcgccctaggtcaacggcttgtggatcaatatcaataccgataactgaagcacctgtttcttttgctacttgaattaacgtcattggatatgcacctgaaccaactaacaataatttgtcattgctagctatactacattgtccaaactcttcatcaatacaatgttctatattgtcaaagtaacctgtggtagacgcctgtccgtctaatagacgtctagctctaatgacttccacttgtttaacacactgcgctgtaatatattgcagtgattttattaattgtgctttttcttcaacgtcacgccaagcattaaattgttgttcataaataggatttaaaataaattcactatagtcatccatcaatgtttctaatgcttcgatatattgatcgtcttgtaatacacgctcgtaatgcgcttcaaacttttctaaatattgttgtaatatcaatttgatttcattattaaagttattcattgtaggctccttattctatatatgcttttcctgtagctacagttgtaacctgtcctttaattgaagtttgatatcccaattgatgacatcgctttgatgtcactaaaatactgccccctggctgatgtactgtaaaatctttgcatgcgtcattacgttgataattattaaaaaccccaattgatgctgtaccagaaccacagctattttcccaaattaaactttgaatttctggtatatagattaatggctgtaaaaattgacgttgttcatcaaaaagcatcatacctactgttttatatttgtgactccattgttgctcacgcacaaacgcttcaaccaaatgttgaatttctgttgttacttgtttaactggaatcacataatgtacatatgtttcataaataatttctattgctttccatgaatgattacccatattaattgttgttggcacaacacgatgggcttgtggcatttgaacttcatagtattggcaatcatgaattgcgcattgcactaaatccgaacagccagacaccttcaccttaaactgttggtctttaagcaaatgactttcttgcaaatgatgtatatatgacatcgtcgcattaccgcaaaattcattaccgctcataactaagtgaaaatcattgccatcatcattttgtgttgattctataaagcctacctgttcacaacatacatgtgttgcggccatcaactgattggcgatagatgcatattcactagcatcatgttttgaatgaacaagtatcgtcatattccccgaaggattatacttagaaaattctataacctgccgattcatacgacactcctttagatgtatttttagagcctcttttaccataagtaattagaggctcttatgcagttgttgcgaagcaaacaactgtattcctctatacctgtaattttttagaagatgaacctaatagctttttatctattaggtaagtcatgctaattcgcaaaatcgaaaagcatggctttatatgcagttggtgcgaagcaagcaactgtattcctctaaagctgtaatttttagaagatgaacctaataatttcccatctattaggtaagtcatactcattcgcagaacgaaaagtatgacttagtactcggttgttgcatcaacatgcaaccgtaaaccttatttaaagttgcttcttgtggctctacaagtgaatgcagttgtccgttaactacattcacttagatgcttttactgttttcacctcaactaaaacttcaaaaaagttgcagaaaacaaatcgtaactattacgatttgattatatactatattagttgagaatcattgtcaataaaggttgtaaatgaatgcacatttatattttgataatctttccataaacatcgtattctcagcacattcaagtctttttgaaaatttttatcaaacaaaaaaaccagcttcaacgtaaaatacgttaaaactagctttaagcaatacacttcatcaaataaacaaacatttatttttcaaaggttaataattccccgtcatttggtacaacaactctattacctaagtcgttagaatttataaattcattcagctctttacgagataaatgccaatgattgaccgcttccatatgcacaacaacaatttgcgcaagtggcaatgtattagcaacttttaacacatcatgttcatccataactaacggcccaccttcaaagaattgatttgcaccaccattaagaacaacaacatctggttgatacgtttttaatgctttttcaaccccttcaaaccaaactgtatctgctgctaagtataatgtcggctcttcagaatgttttaaaatcatgccgtgaacatgtcctgtcatcttcaaaatttcaccatgaccatgttgagcatctgttttaatcaactcaatttctccaatgtgtgtcacatcattaaatacagaaacgtttgtaaacccataacgctctacttcactagcatcttcttcattttgtgcgtaaattttaatatctttcggcaatacttcaattgctttcggatcaaaatgatcaatatgcaaatgcgttaaaatcactaaatcgatgtcatttataatgtcttcaattgccatgggtagttctacaagtggatttttttgatcttgtctcggtgaatttggaaaagggtcaaatgaacctttatcacttaacattggatcaagtaaaatatgtttccccccatattcaataacagccgtagcatttcttatatgtctaatattcattttatatccccctatttcatatgtctttcattgcgacaatatgcatactttgcttacttcatgccaaattcttttccactggatatcgattttaaataattattccaatgtccgcttccacgaatcatcactcaacatctcgccaggccatgtgtaagccataacaccaccgtcaatgcgaattgtttcaccagtaataaatgaactgtcatcagatgctaaaaagacaacgagcttgcctacttcttctggtttacctaaacgtcccagcggtgtcatccatttctgattttctctgaatgttttgccttccttatcttcgctagtacctgtcagtttatctactaacggggtttcaattgtgcctggtgcaattgcattggctcgaatgccctcgcggccatactcaattgcgattgattttgtaaaattaatcactgcacctttcgcagcattatatccagagcgatacaagtctgctgcttgtccggaaaatgaagacgtattaacaatagagccaccttgattcatcattaaaggtaacatcattttcgtcattaaaaatgtcccacgcatatctacattcataatcttgtcatacacatctattggatactcatgaattctatcagccgcattatccacaccggcattattaaacaacacatcgattcttccaaactgttcctttatgtcagacacaaagtctaccacttgttgttcgcttgcattatccacattatacgccttcgcattgtcaccattacttttaattttatcgacagtctccgataccgcttcagctatgtctaccgccaatacatacgcaccttattgagctaaagcgattgcagaagcttgaccgatacctgtacttgctcctgttacgactgctactttattttccaaacgtttcattcagtcactcctatacaacatatcttaaacttacagtccttattttccactgttcgatgcttcataaacctaatagataagtcttcaggcagtcttaactactctgctatacactttctattgaataactcaaaatatttaacaatattagtttttttattttctgaaaattgttacttttgagagtattttttgttacactttaaatatttaacaaaggggggaataattgatgacatcaaaacatcaacaaaaggggtctatcgtcaatcgtttcttgaatagtgttgaaaaaatcggaaataaattgccagatcctagcgtcttattctttttaatgtgtgtgggcttagccattatgacatgggttatctcattatttaatgtatctgttaagcatccaggtacgcatcaaaccatttatattaaaaatataattagccatgatggatttacgatgataatgaatgatacgattaaaaatttctcagagttcccagcattaggcttagtactagcagtgatgattggtattggtgttgcagagaaaacaggatacttcgataagttaatgatttctgttgtgaatcgcgcaccacgtttcttaattttaccgactattatattaattggtattttaggtagtacagccggcgatgctgcgacaattatcttgccgccgcttgcagcaatgctttttattaaaattggctatcaccctatcgctggactaacgatggcatatgcttccgctgttggaggatttgcagcaaatatagttgttggtatgcaagatgctttggtctattcatttacagaaccggcaacacgtatcgtttcagattctattaaaacaaacgttgctatgaactggtactttatcgcagcgagtgtcgttgtattacttcctacgatattgctagttacaactaagctcattattcctagattaggaaaatatgatgacagtttaatgcatgatgaccatgaagaaacatcttcacatattactgacaaagaagcacatgctttaaaatgggcaaatatcagtttcatagtcacaattattttattaattattacagccattcctgaacatagctttttaagaaatgctaaaacaggcagcttactagacgatgcgccattaattaacggtgtcggattaattattcttgtcgtatttttagtacctggattagtttatgggattttaagcaaagaaattaaaaatacaaaagacttaggtaaaatgttcggcgatgctgtaggatcaatgggaacatttatcgttattgtgttttttgcagcacagctacttgcgtatttaaagtggagtaatttaggaattatcgctgctgttaaaggtgccaaattattagaacatcaaaacggtattgtattgatactaggtattattgtactgagtgcaatggtcaacatgttaatcggaagcgcatcggctaaatggggtattttaggaccgatattcgtaccaatgttaatccttatcggctttcatcccgcattcacacaagtcatttaccgtgtaggcgattcaattaccaatccaattacaccgatgatgccgtacttacctttattattaacttatgcacaaaaatacgataaacgcatgaaactcggagccttactttctagtttaatgccgtattcaatcgcgctaagtattgtatggacagtatttgtcatcatttggttcctattaggtatccctgttggaccaggtggaccgatattcgttaaataacagtattcaaagggataaattaaaatgccactatacaagatttgacctgtatagtggcatgatttgttatgatatagcgttcgagatgaaactctgcatttatatgaacaattatagtctatcactaataatatttaatctgttccaaccgttaatttggtttacaacaaagacaagatcaataatttgttcttcatcataaaatgattttagccggtcaataatttcaaacttcttaaagtctttgattgaatttaacatttctgcaaattcaagcgtcactttttcttgatcagtaaataaatctaaatgtctaaaactcaagacttcatcaattttcatttgtgttacacccaattcctttaattcttttttatggatatcaacacaataatgacaaccgttaattttagaaattaataacttaatcaatgcactaagttcatcattaacgggtgattgatgaataaacttttcaccttggctcattacagacattaactctccattttgtttcttgtaattatacggcatttgcaatctctcctttacattgtttaataccaatccagtgatactacacttcgaacaatattggatagaatttgaaattctgtataacatcttgtcaatctatgctttagttaaaacatttagcacttatatttaaaaaatatataaaatatgaaaacagattgaaaggatattataccttgctctacccttttttataaaaaatcacacacatttgagaaaatttgataatgtcaataaatcacgtcatcgacattgttattcgatatatattgttcttataatggccaaactattattccatttaaattaacgtggttcgtttgtgttaatgtactgtacaaaactggggaagtattggtgatgatgaagtgatttatattaattgcgaaacaccttcgatagcaatgacatagattattggaagattaaatcaaaaataaagaagaccctagtggccttcttttttgtctaattcttctttaattttttcaggagattttaaatgatttgctggttttagtaactcacttaatctttcactttctatcatagcaccaccaaactgataattatgttctggagacccatatgcaacaaaatcagcttttttgttttcattgatgtaaccttcaattacggcatcgcccataggtcctctttttaaacttgtgaaatgcacagatttaatcgtgtttggttctttggtattatgcttgagatagagtgtaatacgctcctgttgttctttgtagtaaagtgctttttgtttttctttttcgtcatatttcacttttaaataaatgactgtagcaactatacatatacataaaatgacaccaataattataaaaacatgctttttgttcattaaagtaactcctaaaatgtggtggaaaatgaaaaagtttttatagttctgtaattatgaacattatagattataaatcataacattaatatcgtcgccttcactcacttgattgttaaaatcaccaattactgagaattgtacaaggaataattgtctatcatgcccttatatcattattgccttactaatattaacaaaaccgatagctattacattaaatgcctatatcccagacctcaaacacctttttatacaggacgcactgtaatttcattcacgttaacgtgctttggttgtgttaatgcatataatactgcttctgcaatatcttgtggttcaagttttttacgatctgttggattgtatgcggcagttatggctgtatctaccattcctggagaaatgcttgttactttaacgcctgtctttgccaactctttttctaatccttgagtaatagtgtgaactgctgctttcgtcgcactataaatcgtactgcttttcgttacttcaaagccagaaatagatgcaatgttaataagatgaccacttgattgttctaacatagttggtaatgcagcctgtgccgtatataaagtgcctttgatattcacatcaatcatactatcccactcatctacttgataatcagtaatcttagacgataacatttgtcccgcactattgataacaatatccaaaccaccgaatgtttgttgtgcaatttttatcaattcatcgacttcttcttttttcgttacatctgttggcactaccttcacactatcttgagctaattgattcgccacattttgtagtttatctttatttctaccggctaagacaactttcgccccttcttcatgtagtaatgttgcaattgcttctccaataccactacctgcacctgtaactactgctactttatctgttaatactgtcataatgatcgactcctttgattctttttattttttcagggtaaatcaaaaatacatattacttttaaaaagcgtatcacaattcatataacggtcataataactcgcttcattttcatagataaattacattacaagccattcgaaatatacaattaatcgttgcttatattttttatttttaaaaatgttgaaaaatcgtcacttctttattgtaaaaacattatattagtactaaagttaatactgtgatttatcattcgattgaatgattagagggaggaataaaacatgacatatcatgagcgtgttttagcattaagagctgaaagtaaaagaaccgcatttgattttcgattcgaagatttatttagcaaagaagaatggctaagtatgtcgcttgcagaaagacaaaaagctgaaaaagcatttcgacacgaagttaaaaatatggacgatgtaagaatgcccttctcaagtgtccatgacgcccaagtaaaattatataatgttgtatattcttataacggcattaaacgtaattttaaacaagttgaaaatgaaggattctaatatcatttcgtttatatatgacatgatagaattttatatgtaaatcttgtaggtaatcgttttaaaaataatataagcatgactaaagccacatccaatataggacgtggcttttagtatcgttccagatttgtggggagttagggtttacttaattaaaggggtctgccctcaattgctcaccaacgagggcaagttacatcaatcacacttcaattgccgccgactaggggtagtaatcattggcaataagaactagttagtgactaacgatttacgttccatagcaaagtgatacaaacgctcagcatcaatgtaaggcatagaatcaatagttaggtaaccatctttgatgtcaccaattaatccttgatttacaccagtgttcacgtaaatatcatagctacttacgtctgagaaaataagcgcttcaatctcttttctcataatcatcactccaatgtttatatattatttatataaactctctcgtctctctctatttattaacttcttacaagtctaatattacatgaatttccaaataaataaagagttttgtgatgtatttcacaaattcatcactattttggaaaattaagaaatatttaattatataaaagtttaataagtaagaaaatatgataaaatgtagatgttctttagacattaaaagcttctaacatgatatggaatccgaggttccgatatcacattagaagcttttttgttgcggtgcttatattaataatggcatgaatgaacgcatgctgtcttagtttcaggaatcggctagaatattaaacttccgttctttgaatattttttaatttcttactaatatcatccagttcattcttcgcctttttaaaccaatctccttgagctacattatcaaattcacctttaatttttttgaaatggctacctatatttcacagctcactttagatatcgaacttgtttcttcagagttacttgttatattaccaggttttatttgatattcagtttgactcataacttgtaccctcacttggagtatattgtacagaatctgtaaaataaatgttttcttctttattttctacaaaggtaaattctagattttttgatcctactgatgaaccttttaaatctccatcaccttttattaataatttcggagctttgttggttggaatattatatctttttcgaagttgcttcacattgtagtcatcgtttttcaattgatattttgcggaataacttggaacattaggattatatgaaatgtcaccatctttataatcattaatatctttaaagtcaccgtattgtacaaagaatttaaagttttcgatttcttttcttaatttatcatcagctatcggtttggttggaatgattctattatgttccattttcactggatattttgtatctttactatgtgaataccctttactatcctcggttatttctctaacaacaaaattacctttcgttgttctagtattacgatttatatagagcaccattcctctagattccatattgctattatttgtctcaataatcattttagagtgaattatccaagtgcctttgtcacctttttcaaactcttcgtcacgaaagccttccttatcatagaagtcttcaagatttttggttggatatacactcaatattttgttgaaattttctttaatttgtttatctttactactttcttcttttttcattccgcaagcgcctataaaaacagatagtattatcaggcatagacacaattttaaactttttgaatgaatcatcatttctccaccttatatttttaatactgactcaatctttaatttatacatttaaagcgaaaaattttttaacactttatgaaattttcaatccaaacttctattaaccctatttagtttgactcataacttgtatcctcgcttggagtaaattcaaccgaatctgtaaaatagatattctctcttttattttgtacaaaggtaaattctaagtctttagagcctatggatgaaccttttaaatcgccatcacctttcaacaatagttctggtgcttttttagtcggtatatcatatctttttcttaattgttggatattataatcatcattacttaattgatattttgccgaataacttggtacgtttggattgtatgaaatatccccatttttataatctttaaaatctttaaagttgccatattgtacaaaaaacttgaagttttcaatttctttttttaacttctcgtcttttataggttttgttggtatgattttattatgttccatcttgacagggtattttttatctttatcatgtgtatatccttttttatctttagttatctcacctactataaaatatcctttcgttgttctagtgttacgattgatgtaaagtaccatctctctggattttaaggctcctccttttaattggatgttcattccagaattaactatccaagtacctttatcaccctttttaaattcttgatctcgaaagccttctttatcgtaaaaatcatcgagatttttggttggatataattttaatgtttgattaaatgtgtctttaatttgggcgttttgaccatttgcttttgtcataatgacataacctacaatcaatataatgagtaataccaagcatataccgagcgttaatttctttgaatgcatcatcatttctccaccttatatttttaatactgactcaatctttaatttacacaactaaaacgaaaaatcattttgaacactttatgaaattttcatttcaaacttctattaaccctatttagtaggtttgaaattaatactatccgtaaaatagatgttttcttctttattttctacaaaggtaaactctaaatttttgtgtcctatagatgatccttttaaatcaccatcgccttttattaataatttaggtgctttcttagttggtatatcatacctctttctaagttgcttcacattgtagtcattgttactcaattgatattccgccgaataactaggtacattgggattatatgatatgtcaccatctttataatcattaatatctttaaagtcaccgtattgtacaaaaaacttaaagttttcgatttcttttcttaatctatcatcagctatcggtttggttgggataattcgattatgttccattttcactggatattttgtatctttactttgtgcataccctttactatcttcccacaattctctaacaataaaattacctttcgttgttctagtattacgatttatatagagcaccatacttctagattccatttttttatccttcagctcaactaccatctcagaatcaacaatccaagtccctttatctcctttttcaaactcttgatctcgaaatccttctttatcataaaaatcatcgagattcttggttggatataaactcaatgttttgttgaaattttctttaatttgtttatcttctttcataccacacgcgctaataaaaacagctaataatactaaatacagccagagcctcaacctttttgaatgaatcatcatttcacacccccatttttatttttgatgcaaagttaagttcaaattccaatattaataatactagagggaattttatgattaaatcctcttggcttttaattgttagttgtatttttcacatatcaacatcacaaattatttaaaaagcgcaaatatctttataatttttattggcctaaccaactaattaattaagataaattgcgcttatatttaaaataataacactgaaactcaatgtctttacttattaaaattgatgtttaaatacatctttactaacattcatttttcggtttacattaatttgttatatagcgatatatatcatctcttacagctttatcgagtgctaaatccatcgttactacgtttgaaccattcggcattttatcttgcttctctgaaccttctatatatccagcagttcctaaataataaaaatatataccatcatcatcttttttctgtacaaaaatatacattttaattccttttgctctatgggacaaaattttctgaacttcttttgattttagcgttctattagatttagtaaaccattttaattcatcttgacttaaaaattcatcttcatattttgtgctatcacttatatcctcatgcttatcataagtgataaatattggcatttcttggcttcttatcatgtatcccatgattacagacgaaccatttttattccaattaaatattttgctaaaatcttctcttgaatatttattatataaaatcagtccatttttacctttttggtatttttcattgttatactttgataattcaataagatcttctaaaaatattttaaatgtttgattacttagagcattagtaaatgcatcgcttagtcttatcattctttcattacattctataatgggacttccatagattttttcaattcctgcgttgtaaaatgaaaaatctaaaattcttaatgaagtatctatatcatcttctgttatatccttaacttcgttcaacattttattttttaattcatcatatgttaattcattttttaaaagttcttctaaaactaaactatcgattcttttcaatccaggtgctatttgtcttgaaaagaaaaccagatttttagattcattttccgtcaataatgtatctatttttttatatctcactaagaactcgtaataattactaaatttagaaaatataacgcttggatctatagaatgttgttgtatgaaatccattagtaacggcatgtgtcccaatctattttcaacttcttcataagcttttaatattaatttattttgatttaatgatactgcatccaatgaattgtaaatctgttttttagcaacttcttcaaaattaattgtagatactccattaatcgaatcgttattcgttaaaaacttcttataattatctttattttgcgattgatccccagaaagcgcaatcggaattaaataatttgtcttataattaccaataaaatcaattactgtaacatactctttatttgaactttttcttaatcctctaccaagttgctgaatgaatataatactagactctgttggtctcaacattacaacttgattgacttctggaatatcaataccttcgttaaaaagatctacagttataatatagttaatcttaccttcttttaatttttctattacaatttggcgataattaacactatcatctcctgttaaagcaacacttttaatcccttttgaacttagtttatccgctaaatcataagcttcttttttgctacttacaaaaattaatccttgtaaaatttcacctgaatatccatagtaatctgtcttttgaataatataattaactctttcatcagaagttaaatatctcagtttagttacatcatcttctttaataccttgatgtacataatcagtcacaccaaaataatgaaatggacataaaatatcactttctaatgctgcttgtaaccttatttcatacgcaatattataatcaaacagttcaaatatacttaattcatctgatctttctggtgttgcagtcattcccagcatgaacttaggtttgaagtagttaaatactcgttgataagtagatgcagcagaacgatgtgcttcatcaaaaacaatataatcaaattcattttcatcaaattgcttaaaattatcatctctagataatgtttgaatggttgcaaataaatatttggcatcgacatctctatgttttcctgtcaacaatccaaaatcactatcattttttataggtaatacttttttaaattcttccttagctctatttaaaatcccctcattatgaacaataaataaaaatttattagggtttacttctctaacatctaatgcacataaaatcgttttacctgtaccagttgcagatattattaacgccttatctttggctttatccctaatagcttttaatgaccttaatgcttctgcttgcattaaattgggtacaatttccactgattttttcaccttatcagctagcagcatttgagtttgttcaacctccgctaatttttctaaggagcggtactcaaatgattctttatatgatttaatccattgctgagtcagtggggtactcttttgccataacaattcaaattcattttttacactatcaactaaatcgccatttttcatagtagacagtaaaacattatgctcataattaacctttaacgcattagatgttaaattagagcttcctattaccatagaactataatccttatgttcaaaaatatatcctttggcatggaatccagcaatatcagttaatcttacctctacattttttaatttaagtaattctccatacattttaggactattaaatcctaagtaattagatgttaatattttccctttaacacccttattgcttaaatctaatagttgagcctttaagctggctaatccgctttctgttataaaagctacagaaaaatagaacgtttcacatttttgaagttcatctataattgttgaaaggactttttcatttttattatttactaaaagcttcggtgtataattccctttatgagaaatatctttgtctataaaacctttttttaaagattgattgaaatcatttagtaatctactcatattatccctcagtcataattttattaacggctggtatatccgctggggcccaatttaatttatcaagttcgtttattgacaaccattcaatactcttatgttcagttaaagttggtaactctttgtttaaagtacatttgtatgttgttaacttaacaatgccaaaatcatattcatgttctgtagttatgactttgtctccaacaattagatcacatttcatttcttctctaatttctctaatcaaagcttctttttcagtttcattcttttcaatcttaccgccaggaaattcccacattaaaggtagactcatttcttcacttctctgtgcacaaagaattttgttatcagaaaaaataatagctcctactacattgattacttttttcataagactcacccttcaatttaaaatcatcttaattgttattctatcaaaaattacaaaactatatataaatcaatattaaaaattaatattttacaatttcctgcatgatatatcactcttacatctactccatgcattttcatacacatctattatataatacttgtgaaaagtattgtcttggggctgtgtttttttacttttggggcgtatttctttataattcattacataaatgtaagggctttagttttcatgttttattaagtctaactgagattttgaaaggatgtttagcaacaatggataaagaattatggatagaacgagctaatgatagtttagttaaacatttttatgagcagcaatctgacattgaacagcgagaaggttttgaaagtaaattaacatttggtactgcgggtatacgcggaaaattcggtcttggtgaaggtcgacttaataagtttactattgaaaaattggcattaggtttagcgcgttatttaaatgcccaaacaaacagtccaacaatagtcattcattatgatattagacatctttcaactgaattcgcccaaataattgctaatgtattagcaaaccatcaaataacagtttatttacctgatacatataaaacgacaccggaattatcgttcgcggtgcgcaatcttaatactactgctggcattatgattacagcaagtcataatccgaaagactataacggcatcaaagtatatggttctgatggtgcgcaattatcgactgatgcatctgagcttgcaagtcgttatatcgaagaagttggcgatccattacagattgatatacctatttctaaacaaaatacatcttatatcaagccttttccgaaatctgtaactgatgactatatgaaacacattcaaaatatgattggctatattcctaaatctgatttacaagttgtgttcactagtttacatggtacaagtgttccgattgtacctgagttattacaatctttgaatttcaatcaatttaatcttgtagaagcacaatgtaaacctgatccgaatttcagctcagttcaaagtgctaatcctgaagatcatcgcgcttttgatcaagcagtcgaacttgcaaataaaagtcatgcagacttattaatatcaactgaccctgatgcggatcgtcttggcattgctgaacgtgatgcacatggtcatatcacatattttaatggcaaccaaattggtgcgttgttacttaattatcgtattcaacaaacgtctcaattacgtcatcgcttaatgattcaatctattgtaagtagtgagttaacaaagtcattagcacgctataataatgttgaatacaaagaggtgcttacgggctttaaatttattgctcaggaaataagacaactggacgatcatcaaaatatgattttcgcctttgaagagagttacggttttctatcagagccttttgtacgtgataaagatgccgtacaaattgtgccactcattataaaatacgcttctgagttaaaattatatggcaaaacattgaaagatgaattagaacagatttatcaaactgttggtagacatgaggatacattattctcgcatacgctagatggattagaaggtaagaaaaaaattgaatcaattatgacacatttccgttcaaatccaccgcaagagattcaaggactgaaagtgaaagcaattgaagattatttaactagcgaggtttatcatttggataaagatacaacgtcacagattaattctcctaaatcaaatgttattcgtgtcttatttgacgaaggatttatcgctttacgtccttctggtactgaacctaaaattaaattatatgtgtcgttaaaatgtcggaattttgatgatgtagctcaaaaaattaatgcgatgatttttagctaattaaaaattttatacatcgaaatattacatttcattttatacttatcagcccttttgaaactagaatccttatgttttcgcgttttgaaggggctaatttgtaataatttttcaaaagtatattagaaaattaattttcatgtatttttcatattaagcggtaataatataataattaataccgcgacctatttaattgttttcgcgatgaaaaaggtttagaattacaaaaataactattttaaatttagttacaaatatattttagaaaggatgtgaaataatgaaaggctctaaacaaatacttttgattatgggcattatatctcttattgttttatttatttttacactattcatcatggcgcaatatgcaaaacattatgaacaaaaatccgacagttccaacgcacatactttaaattcatcatcagccataattgagcaacatactatgtcgaatttagcgtctctagatttatacgctcctgttcgtaacattacttctagtcgtgatattcatcccatttatttcatgacaaaagattaaaacttcctttttcataaccccattcaactaataaattaaaaattgataaaaacgtactgttttttagaaacatacatatataagaaacgcatccattactaaaagacagtacattatattctatcaggaaggtgcaacaatgaccgtcaacatcgtagtttctatcgtattctgcataagtatggttatattaggcatttatgtcgcaataactaaagatttcacactaatttcttatataaatcaaacgaccattgcagataaacgcaagaaccaaattgcatatatatttgcgttatgtatcagtttgagtgcagtatttttaatgtcttcaattctatgctttgaatatgattttattgtattggcattcttatttttaactatagcattattacttatcgcattattctatgtgtgcttttataaaattacaaaatatccataaatgtttgtgatagtgtgttggttagatttaatggtgcgctttcagcaagcaattgtttgcgaaaaaaatacaaccttgtacgaatacaaagttgcattaatatagaatcatttatgctttttaatatcacaaaataaattgattaaactagctaaaacagtcaaaattggaatcaagattacataaatatcatgacctctagatattagtatacataatataattagcgaccctattataattgctaaattataagccaaactaattttatatttcatttcaattcccaccttaatagcattgattaaaattctattatgtttacatagacttcttaaaaaactttaaccccgataagctaagcattgaaataattgcacctcctgatataaatatattacttaagcttagtaaaggtataattaaacttatcagtcctaaagataatgtatccgctgcgtaattcgatgtagatgagatactaaatactttccccatcaaatgatttggcgtttttatttgaatggcaactgatcttgttagtccctctatagattgtccaagtcccactaaagttgcacctatatatagtatctccaaacttggaaacacattaattatcgataagccaatcccccaaactaaaacaccaatactaaatttaaagattaatcgtttttctgacagtaaacccataatcaatgacattaataaagacgctatacctaaacatgatgtagctagtccatatacaccaacgccctcttttaatatattggaaataaacaatggtaatgcaacacgccaaaggccagtattaatcaatatgcaggcaaattgaatgattataataaatggaatttctttagattttttcaagaattcccaagtttcagaaaaatcttcttttgagtgtctatcaatcatgttgttatttgtatattttaaaagtgcattaaaaataaatcctaaaaatagcaatatactgcaaataaaaaagacgccaacattaccaactagtattacaatgacaccaattaaagcaggtaaaataatatttgagcctctttgcaaactatcgattaacgcattacttgttgctaaatgctcctcatcaataatttcaggaagaattgccctaaacgcaggatccgtatagcagttaataatggtgatagctgtagatatggttagaagcgtcagataatttaaatttgatgttattgcaagtaaaggaataattattataatcaaacttagtataagatcagatagataaagtattttctttttattatgtttatcagaatatgcgccaccgaaaataccaaatataataaatggtagtgtttgactcataaccatcattgataattttaaagatgattggtttgtcaattcaactgtaaaccaaattatttgtaacgaaaacagcacaaagcaactccgacgtaagaaattaccaatcaataaatatgtaaagtttctatttttcaaaacttctaagtacaacatatttatcacctctcataaaaataattgaatgcatccaccagcttttttagaccttcttctaaactctctttatccaaagcgcaattaattctaatataatttagtcagttaaatatcaattatttcgaaatttacatactacttgaaacaccatacataacccccaaaatgactactcagaggttatattctactaattatgattatattaaatatgaaaatattatcaaaaaatcaaatttataacaaaaatacaccccttaaagttaggtctttcaatccaacttttggggtgtatatcattttcatcatattctaggttgtttttaacaaactaaatatagtgaatgcaaatcaagtattatttaaataatgaattattttaattttttcttctacgtgccaataacattaatccagcaattccaattatactactaaagatcaatcctttttgtgtgctttctgcacctgtttttggtaattctgctcgttttttctcttgattagctactgattttttagcaattttagattttttaactttatcatttttatccattgaatgaactggttcatttggttttgctctgtctttcgataatcctggattgtcaggatttactgggccacttggatgagttggtctgctcggcttctctgggttttcaggtccttttggatcttttggtttctcgccaccaaactctacaatcttatctactggttgttttgtaatctcttctgttggttgaccctcgccaactttttcacctgttaatgggttcactgtgattggtgttgtgattgtcttacttcctggttgtccctcttgtttcactcgctcttcaccaggttgtaacttcggattaaattcacgttttgtttcaaacggtatctctactgtttttgtttctggtgtacccgtttttggtccgtgtttaatcacatcatccactggctcttcgatcacttttcctgtgtctggattcttaattcctggtttacctggtactttttccgtttgatctgttggtaagtttggatcgaagatatctttatgaccttgcggtattttctcgccaccgaactctacaatcttatctactggttgttttgtgatctcttctgttggttgaccctcgccaactttttcacctgttaatgggttcactgtgattggtgttgtgattgtcttacttcctggttgtccctcttgttttactcgctcttcaccaggttgtaacttcggattaaattcacgttttgtttcaaacggtatctccactgttttcgtttctggtgtacccgtttttggtccgtgtttaatcacatcatccactggctcttcgatcacttttcctgtgtctggattcttgattcctggtttacctggtactttttccgtttgatctgttggtaagtttggatcaaagatatctttatgaccttgcggtattttctcgccaccgaactctacaatcttatctactggttgttttgtgatctcttctgttggttgaccctcgccaactttttcacctgttaatgggttcactgtgattggtgttgtgattgtcttacttcctggttgtccctcttgtttcactcgctcttcaccaggttgtaacttcggattaaattcacgttttgtttcaaacggtatctctactgtttttgtttctggtgtacccgtttttggtccgtgtttaatcacatcatccactggctcttcgatcacttttcctgtgtctggattcttgattcctggtttacctggtactttttccgtttgatctgttggtaagtttggatcaaagatatctttatgaccttgcggtattttctcgccaccgaactctacaatcttatctactggttgttttgtgatctcttctgttggttgaccctcgccaactttttcacctgttaatgggttcactgtgattggtgttgtgattgtcttacttcctggttgtccctcttgtttcactcgctcttcaccaggttgtaacttcggattaaattcacgttttgtttcaaacggtatctctactgtttttatttctgttttcttaactagattaggcgttagtttaaatgttgagttatttaaatccgttctcatccaaccatttgcatatacaccttgagatgttccctgtctttgactagaagtaattaaaaagttatatgcttcagatttatccaatcccaaatctgatatattagcttcccaaactttaccagcatattcggctctcattatccccgatttttcattgtacgctaattttaaattattaagtaattgaccatggaattttccatctgttgtatcaatagaattatctgcatattggaatgaattatccgctttacctcttgttggtatgtttgttccaacctttgctgtagttccatcagcacctgtttttacaaacgtaccataccctttaaatccttgtcctgcctgtttctcttctttatccatgggatctttaaaattataccctgtatcaattttaaatcctgctgaattttccattcctttgggacctaatatacctcccttttgtaaatattcgttaccgtcacctttactaaataagaacccccatccatcagcgccagttgttaccgattgatgattattagctactctaatgttaaactcaaagtcatttttaaaagaaactttattctttaattgtaatgctcctgtcaattcgttttttccaatacttttattattgaaacgagtgacttcagatacctttagatcctctggattgctttgtatatcaacacttccgtaaccttcaaaatgttctttaccttgaattgtaattggggtagattcaactacatttttagaatctcttgtaatatcaaaagagccttcatcaacagaacgagcttttctaaccttaggtgtctctgcgttatgagtgactgacgatttcggctgaacttcagcaacatcagctacttcttttggtgtatcctccttttttgatatatcttcagcttttactgatggttcatgttcgattgtgtctttgtttgaagttacttcagatttagcttctacaccctgtggtgcagtgtctttgtttgttacttcttcaatcttcacttcttttgattggacattatcttttaatgtagttggattctcaatattgttttcagctgcttctgcctcttgttgagttcccaaatacattagtgagccaattaaaatagatgctgttccaactgtaaattttcttattgaatatttattcaatttatttgatagaaaatctactcttttatttaccggtcctttcttatctctcatttgcatactcctttttccatattttccactttacttacagtgaatttacatgtaattttacaaatacaataggagttgcacaatggaatataacacttatctttataaaattattttatatattgacacacttaaaacaatctacaaataaaattattatttttagttttcaatgaataattcattcttatctgttggaaaaacccatcaactcaatagcattgaatttctaaaataaaaaataccttaacgcatttaaaaatacatttaactgcaccaagatattaaaatctcgaaacatactttatgtttcattaatatttatttcactcaaaagatttttaatataattgtgttgttttacagaaacaacaatgattacatttctactatcatgtgggtctctacatttattcaagtaacccttttttgataattcttttacgcttttaacaattctagattggtctataccgatataacttataatgtctctcataaaatatttaccttcatcatttttaaatacatctaaatatgctaatactaaataattatctaatgtaagacaaaaatatttttttaaatatttacgcagctcatatgtagttaatactcttttcattaatttaatattgctcttgcttttcaaatcattcatcaagtcttcatcccttacttttaattgtcacgtcaaataatatttgtctttaactagtaataactccaaatatatttagtttgtggtgctagctataaacacaaatgaatcataacactatattttgattttgttcaattgtttttgtttttggataataaatgaatttgtcatttgttattccgtgatttttagttatttatattttatatatattatatataaaaatatttaggttaacatgtcttcaaaagagattgcttttatattactttaaataatataaagtattgggacatcagaaaatagtaggagaatgtaaggtggactatcaaactttcgaaaaggtcaataaattcataaatgtagaagcgtacatattttttctcactcaagagttaaagcaacaatataaattatcattaaaagaattgttgatattagcatatttttattacaaaaatgaacacagtatttcactaaaagaaatcattggtgacatactttacaaacaatctgatgttgtaaagaacattaagtcactatctaaaaaaggatttataaataagtctagaaacgaagcagatgaacgccgtatttttgtttcagttactccaatacaacgtaaaaagattgcttgtgttattaatgagttagataaaataattaaaggatttaataaggaaagagactacataaaatatcaatgggctccaaaatatagcaaagaattttttatactttttatgaacattatgtactcaaaagattttttaaaatatcgatttaatttaacatttcttgatttatctatcttatatgtaatatcatctcgaaaaaatgagatactaaatttaaaagatttgtttgaaagtattagatttatgtatcctcaaattgttaggtcagttaatagattaaataataaaggtatgctaatcaaagaacgatcccttgcagatgaaaggattgtgttaatcaaaataaataaaatacaatataacactattaaaagcatattcacagatacttccaagattctcaaaccaagaaaatttttcttttaaatttaaacagatttacctcttgataaaataaataagcaatcatactacttctcaatttagtataaataaaaatacataattaactttcttttgtttttatattatttcaataccctactatatatcacaacacataaattaagcatgacactcattcaatttagttcaccatttcgtgttccaattttactgagtatcatgcttttaatgttataaacctaatgctttaataaatcgtgttaattcttctcgcatactgtcatctttcaatgcatattctatggtagttttaacgaagcctaatttttctccaacgtcataacgttcgccttcgaagtcatatgcatacacttggttatcattattcatacgttcaatcgcatctgttaactgaatttcgttacctgcgccttctttttgcgtttttaaataatcgaaaatttcaggcgttaatacataacgtcccataatagctaggtttgatggtgccgtaccttgtgctggcttttcaacaaactttttcacttcatactgacgtccgtttttagttaatgggtcaataattccataacgatgagtatctgcttccggaacttcttggacacctataactgagtgccctgtttcttcataaacgtcaatcaactgtttcactgctggcacttcagattcaacaatatcgtcacctaataataccgcaaatggttcattgccgataaattgacgcgcagaactaatcgcatgccctaaacctttttgttctttctgccttacataaaaaatattcgcaagttccgttgaatactgaactttttctagtaattcagatttacctttttcttttaacaccatttctaattctttttgactatcaaaatgatcttcaatcgcgcgtttgtggcgacctgtcactataataatatcttcaattccagctcttgcagcttcttcaacgatatattgtattgtgggtttatctaagataggaagcatttcctttggcatcgctttagttgctggtaaaaatctagtccctaaaccagcagcgggaatgattgccttttttatttttttcaaagttaatgtgctccttttcctaagtattaaatctatgtatcaacgtcattttaacactaattagaacgccttcatagtgtcattgagtatgtaattatttcatgggaaatttgatttaatataaaaaaacaggcttacttcatataatttatgaaataaacctgtcaattttagattgattatgctttgtgattctttttatttctgcgtaataatgctaaacctagaatactaaataatccgccgaacaacatacctttgtttgttgattcttctccacctgtttcaggtaattccgttttcttaggttgtttttgtttagttggtgccactgctttaaccttttcattgatttcaatgacaggtgttactaccttaccttgttccactggtttagaaggctttttaggttcttcttttgcgggtggtactggtttaccaggttcagttggtacctctggcgttggtggcgttggtacttccggctcactcggtacttctggcgtcgatggtgttggtgtttccggctcgcttggtacttctggtgtcggtggcgttggtgtttccggctcactcggcacttccggcgtcggtggcgttggtggcacgattggaggtgttgtatcttcttcaatcgtttgttgaccttcattttgaccgcttacttgtggaagtgtatcttcttcaaagtcaacgctgttgtgtccaccgaattgataatttggtttatctttatttgtatcttcctcaataatttcagtgtacttattgaatccgtgaatatgtggcacactgtcgaagtcgatatcaatgatgttaccgccatgttcatacttaggtttgtctttttctgtatcttcctcgaatgactgattaccattattttgaccatgaatttgaggtacactgtcgaaatcgatatctacgatattgccaccttgttcatatttaggtttgtcttcttctgtgtcttcctcgaatgactggttaccgctattttggccaccttcataacctaattcactcttaatatcaacgtggctattttcttcgatttcttcaatcacgtcataattcccgtgaccattttcagttcctaaaccagaatgagaaatatgatgattgttttcagtaatttcctcgattggtccttgtgcttgaccatgctcttcaggtaattcatctactagttcaatcagattactttcagtcgtatattctttcgtatcttcaactgttgtatggtcgctcactgcgccagttagaataccttttgtagactcttcgtcaaattcaactaagttagactcagttattacttggccaccacctgggtttgtatcctcttcatattcaacaacatcagcgtgatgttttgaattttcatgtgtagattcttcaaaatccacatgaatagaatcttcttcagtttcaataataccttctgcatgaccttctacaccttcaacagctgtatgatattcaaaatcaattgacttagaatcgttactttcttcgattgtaccagtcaattcatgcttctccactggcggctctgatttaatgtctaattcaattggttcactcttctcaatgataggatcatttggcttatctttaccgtcgccttgagcgttattagagtagaatgcaacgccattgtcccatgttaaacttactggataataatagtaataaccgtaattagcatgatagccatgcaaattagttctgaataataactccttgtcattttcattatatttaccttcaaaacttacaacataacttttcttatttagtgcatctaaagttaatttatagctaccgttttcacttagcgttaatttatcactcatgtcattggtaacatctttaaatttctcttgatcatttgtgttagcatagacgctttctggtaattcatcactccccaaatattcgtaaactttaacggttggagtactctcagtagacaatccgcctttcgcaaaaaaaccatttatagttattgaggtcatctcactttttttaggattaatatatgctaaatgatgtattttattattttgtttatctaataaagttatacgtccatttacggttacgccccacttatctttaacaccgtctaggtatttgatatcaaattcttttgaaatcttattttcacctaatttaacttcaattgtttgttttccttgttttgtaactgttgttggatcaataaacaaatttaaacttagttcagcggttaaatctttcttatcttttacatattctttgaatatatatctaatttttctttcatctaacacgtggccaacagccacaatgttatcatctttactttttatatctggcactttacgaagaggtgagataccatgtgtttcaacattattacttaatgtgaaatcaaaataatctcccgccttaatcccttcatcaaagttccatttatattttaaggttactctttcagcgttatgaggattaacaacatttgttccttgtttatgtccttctaaagagctttcagtaactttcactttacctgttacatctgtacctgtcgccttagcttctcctgctactacggcaacgtcagttgatcttttcattcttggtttaatttctgagacgttacttggttgagctatgtcaacttgagttcctgtagtttccttatcagcaactttttccgatggcaaatcaactcgcgaagtttctacttttggtgcttgcactgttgttggtgcttcttctgttgttacttgtgttgattgtgatagttgctcagttgatgtcacgctgtatgattgtgtttcatctattgtattaacgttatttgtagttgtttgtgtttcgcttgctttactttcagtagctgaactcccactttcctctactgtagtattgttttgttccgatgctgcagcttctttttcttgtcccattccaacaacgatcattgttcctaagaatactgaggccgctcccaatttgtgttttcttatgccgtatctaagattgcttttcactataatattctcccttaaatgtaaaattcatttattttttaactcaataaatgcaattctatattgttcggtttttaaaagcaatgaaaaaaagcgagttaataaaaagttaagattgttgttaactttatgtataatgagttttttattatttggaactcacatatatattgtatacaaagctcttgaataccttgatataacaggcttgtattttttatactcactttttaaattaaattaaaattcatctaatttaaagcaatatactaaagcatacataataatcgcctgtacaatgcatcattaaaaagtcactgaaatgcctttcattgtattaataacgtcattataattttatatcgttcggtttttgtttgattttaatgattatttatacagaaacagccgtatttcaagacgacattttaaatttcactaaatttgcatctagttaataattgcatttatcaaatttgccttattgattcaatctaatttgtacatacaaactagttttaaattctaactttatctctcattttgtaatcaatcatcagacataaagtgcttcagcaatcagaaaacactctaattttctattagaaatttgatttaatataaaaaaacaggcttacttcatataatttatgaaataaacccgtcaattttggattgattatgctttgtgattctttttatttctccgtaataatgctaaacctagaatgctgaataatccgccgaacaacatgcctttgtttgttggttcttcaccacctgtttcaggtagttcagatttcttagattgtgcttttttagttggtgccactgctttaaccttttcattgatttcaataacaggtgttactactttaccttgttccactggtttagaaggctttttaggttcttctttggcaggtggtactggtttaccaggttcagctggtacctctggtgttggcggtgttggtgtttccggctcagctggcacctctggtgttggcggtgttggtgtttccggctcacttggtacctctggcgttggtggtgttggtatttccggctcacttggtacttctggtgtcggtggcgttggtgtttccggctcacttggtacttctggtgttggcggtgttggtgtttccggctcactcggtacttctggtgtcggtggtgttggcggcgttgtatcttcttcaatcgtttgttgaccttcattttgaccgcttacttttggaagtgtatcttcttcaaagtcaacactattgtgtccaccgaattgataacttggtttatctttatttgtatcttcttcaataatttcagtgtgcttattgaatccgtgaatatgtggcacactgtcgaagtcgatatcaatgatgttaccgccatgttcatacttaggtttgtctttttctgtatcttcctcgaatgactgattaccattattttgaccatgaatttgaggtacactgtcgaaatcgatatctacgatattgccaccttgttcatatttaggtttgtcttcttctgtgtcttcctcgaatgactggttaccgctattttggccaccttcataacctaattcactcttaatatcaacgtggctattttcttcgatttcttcaatcacgtcataattcccgtgaccattttcagttcctaaaccagaatgagaaatatgatgattgttttcagtaatttcctcgactggtccttgtgcttgaccatgctcttcaggtaattcatccactaattcaatcagattactttcagttgtatattctttcgtatcttcaactgttgtatgatcgctcactgcgccagttacaataccttttgtagactcttcgtcaaattcaactaagttagactcagtagtaacctgaccaccacctgggtttgtatcctcttcatattcaacaacatcagcgtgatgttttgaattttcatgtgtaaattcttcaaagtcaattggatttgattcctcagaggactcagtgtatcctccaacgtgacccgcttcgctatccacagcagtatggtaatcgatatcaatagctgatgaatccgtttcttctattgtttcaatgtatccatcaacataaccaccttcaccatctatagctgtgtggtaatcaatgtcaagcggtgtattgtcttgattttcttctgtttcaataatttgcttcgcatcgtattgtccactgatagaaccattaccactatcttcagagaattcgaagttattggagtctacgattggaccatattttccatcaccattagctttattactatataaaactaatccattatcccaagttaatgtatagtgattattataataagaatagtatctgtaactattctccggatatgcagatacttgagttctaaagttaacttcatctgtttcttttgagtactctcctgtgtaatgaatcacatatgtcttatctaatttttctagattcaactgataatttccgttttcttgcacagttaatttattttgcatatcacttgtaacatctttaaacttcgaattgtctgttaagtttacagaaacactctttggtaaatccgtttccttaccttgatactcatacactttaacaatgggtgaatcaccacttacattactaccttgtgtcaaactaccagtaatagatacactttcagatttatttccatttatcggtttaacgtaagctacatgtgtgaatttattatccgctttattaaatgtttcaattgacccattcaggtttgtataatactttccaattccgtctttatactcaacttcaatctttttttcagtatttttcccatttaattttgaagtaagtgtttcttcaccattatttttaacgattctagggtctataaataaattcaagtttaaatttgctgttacattcactttataatcaatgtaatctgtaaacgtgtatctaatttttccatctccaagaagttgaccagtagccattacgacagagccatttttaatctctggtaactttctcgctgttgatacgccataggtatttacattatttgataatgtaaaatcaaagtaatctcctttttttagtccatcttcgaattttaatttatattttagcaccgctctttgtcctgcatgaggttctactttatttgtattattatgtccttcgatagagctttcagtcactgtaactttacttgtcacatctgtacccgtttccactttcgcttccttagcgtccactacgtctgctgatcttgtcacacgtggtttactttctgataccgttcttggctgtgccacttcaacttgtatttctgcgacttgattttgtgtagcctttttaggtgttaaatctacttgtctttgatctccgctattgtcttgagattgtgttgtttccttaacttgaggtttcgcttcttccttaactacctcttctttaactgtttctaaatttgctggttgtgcagtttgtggtgcttgtactgcttttggtgcttcttcagttgttacttgtgttgcgtttgacggttgttctgttactgttgcgttatatgattgagtttcttctatatgattaacgttagttgcagttgtttgtgtttcacttgttttattatcagtagctgaattcccattttcttctactgtagttgtcttttgttctgatgctgcagcttctttatcttgtcccatcccaacaacgatcattgttcctaagaatactgatgctgctcccaatttatgttttctaatgccgtacctaagattgtttttcactataatatctccctttaaatgcaaaattcattaattttttaaacttaataaatgcaagtctatattgttcggtttttaaaagcaatacaaaaaagcgagttaatgaaaagttaagattgtcattaattttatgttaattgataattttattatttggaatatacctataaattgcattcaagtcatcataaacccttgtcacacaaggcttgtattttttatacttatttttaaaattaaattcatcattatctaatttaaaacaatatactaagtgtttcataattaccgactgtacaatacgcacaaaaacatgtcttgaaacgcctttcattacactaaaatccccaatatactttttatatcgttcggattctgactatttcagatgattttccgcataaaaacaaacgtgtttcaaggcaatatattgtaattacctaaaaacacgtttacttaatatttagttaaacaaataagctgatgaatagaatgaagatgatacctgaaacggaaataatcgtttctaataatgaccatgttaagaatgtttcttttacagttaaaccaaaatattctttaaacatccaaaatcctgcgtcatttacatgagacaaaatcacactacctgcacctatcgcaagtacaactaatgcaacatttacatctgatgattgtaataatggtaagacaatacctgtagttgaaatcgcagctactgtagccgaacctaatgcgatacgtagcacagctgcaacaatccatgctagtaaaattggagacatctctgtaccttcaaacattttagcaattgtatttccgacaccaccgtcaattaatacttgtttaaatgtaccgccaccgccaataatcaataacatcattccgattggataaatcgcattcgtcactgattccataatatgattcatcttacgctttctcattaatcccatcgtaacgattgcaaataatactgctattagcatggctgtccctgctgttccgatcatataaatgatagattcaaatagatttgtaggtttgtcgtgcccagttacaagttgcgttatcgtagacactaacattaatataactggtaatgttgctgttaataaactcataccaaatcctggcatctcttgatccgtaaattctttttgtgcacctaacgctgaaatatcgccttctcgtgtatacgcagacggaatcattttttgtgcaactttgttaaatataggtcctgcaatgagtgtaactggaatggcaataaacattccgtacagtaatacatctccaacatttgcctttaattcttttgcgatgactaccggtcctggatgtggtggtaaaaagccatgtgtcactgataaagctgttaccataggtagtcctagttttaacactgaaacatttgcgcgttttgctactgtaaatactaatggaatcagtaagactaaacctacttcaaagaacaatgcaataccgacgataaatgctgcaacaagcattgcccattgtacatgtttttgaccaaatttttgaatcaacgtgtctgcaattcgagttgcaccaccaccatcagcaagtaatttcccaagtatggcacctaaaccgaatattagtgcaatgtggccgagcgtactgcccatccctttctcaatcgtctccataattttagtcaatggtatacctagcattaacgctgtaatcatcgatgtgataattaatgaaataaatgtatttaatttaaacccaataattaatactaataaaataacgatacctaaaacaacactgattaacggccatatttcgttaaacatgacattcccctctttctcttttcaatagaatgtaacaccgtcgtcgcgcacgtattccacataatatatagtagtcatggcacaacaactttatctaagatgcttaagtgacgtatttattgtgttttattttcagccatatgttggcgttgaaaatctgcaatttgttcataattctctgttaaagaacgacttaaattgataaaaatggatacgagctcttggtaaacagcgacattttcttcaaacggcatatgattatttgtagcaccgaccatcgatgaaacgattgaaaaatcttcaatgtcacctacagctttaagtccaagcacgcaggcacctaagcatgaactttcatagctttcaggaaccactaactctgtgtcaaatatatctgacatcatttgacgccatacttcacttttcgcaaaaccacctgttgcttttatcatcttaggcgtttcattcattacttcaatgagtgcaaggtagacggtatacaaattgtaaagaacaccttctaatgcagcgcgaatcatatgttcttttttatgagataaagttaaaccgaagaatgaacctcttgcatttgcgttccaaagcggcgcacgttctccagctaaatagggatggaatattaaaccatctgcacctggtttaacacgctttgcaatttgagttaagacatcataaggatcaacaccgagacgtttcgcagtttcgacttcactcgctagcaactcgtcgcgcaaccatctcaatacgacaccaccattatttacaggacctccgatgacgtagtggtcctctgttaagacataacaaaatattctacctttgtaatcagtacgcggtttatctatcacagtacgaatcgccccagatgtaccgattgtgacagcaacttctcctttaccaacgctattgacacccaaattagaaaggaccccatcactcgcaccaataacaaacggtgtatcttcattaagccccattaatgttgcataacgttctttcatgcctttcattacgtacgttgttggcactaattccggcaacatttccttggaaataccaagcaattctaatgccccaacatcccaatctaatgtttctaaattaaacatccctgttgcggaagccattgaataatcaatgatatatgtatcaaataaatgatagaaaatgtatgttttaatatctgcaaacttagcagtacgttgaaatacatcttgccattcatgtttcatccaaaaaattttcactaaaggcgacataggatgaataggcgtacctgttcgctgataaatcgcattgccatcatgcacttcatttattactgttgcatattttgcagcgcggttatctgcccaagtaatattatttgttaatctttgatgtttctgatccatcgcaatcaagctatgcatttgcgcactaaatgacacaaatttaatatcatctttattaactttggattctctcataacatatttaatagtcattaataccgcatcaaataattcatctgggttttcttctgagacatcaacgtttggtgtgtgtaaatcatagccgatttgatgtttcatgatgaatgttccattttcatcatataagactgacttggtactcgtcgttccaatgtcgacaccaatcatatatttcatgacaaatccttctttctttcattttaattcaaccaaaatccttcaatatctttaccaacatcgtcgaaatttaagtgaaacgcttctttcaaaatttgactgtcgtattgttccactgcatcaataaacacttgatgattatgatgtatgcgttcaaaatcttgcgggttctgttgcatacgttgtcgcatggatgttaaaacgagtgccatcattactggttttaaatgactccaaaatgagtttaaatattgatgattagatgctttgattaatgtttcatgaaattcaaagtcatgcttcgtaaatgattctgcatcctcaaattttactgccactttcatcatttcaagttgtttcttcatttcttttacgataggtagtcgctcttgatttttaactcttgaaaatgcaaaagactctagcatcagtcgcaaatcgtacatttctttcttttcttgttccccaaacggcaacacatgtgcacccattctttctaattggatgagttgattttgttgcaataatttaaatgcatctcgaattggcgaacgactcacattaaattgctttgccatttgattttcagtgagtaacgtaccttcagctatgtgaccattcacaatacctaagcgtaattctgccgcgataccttctccagttgtcataccttccaaccatttctctggatatccatacatcatcaaagccactccttcattacacgacatacttgtatacaagtatgttaatatagttcttaatcgtttgcaagcgctttctttacgcgtactaaaatagtgaccatcccttttcaatgtaaatttaaagggaatggtcactatcacacgaatgatttaattgttatgttgtatgtgggatatttctaattgttctgtactcatatgcgctttaggtacttcaatgcaataatgcgtttcatgacagtttggacattcgaatcgacgtgttgtagcagtatgtttcgctttgataacttgccataaagatggtgagaatatatgctggcagttaggacataaataggcaaccttttgttggtaataaaaagtaacaccaatgccgtatccaatcataaacggcaacgcaattagaaacggccatttatttttcatcaaaattgcacttataatgctagaatattgaattattcctataatacccgcactaatccaaatgttacgacgaatacttttcatttcagctgatttactcatgacatgctctatgtcttttaaatgtgtgattggagacgtcgacgctttatttacgtaatattgaacatttttaattttgtttaataccgcttgttgctgtttgacttgttgattaatttcttgttgtttcatagttagtaaagtattgagtgtcttcaaagtaccttcaccttttagcaacatatctatatcgcttaacgcacaacctaaatctttaagcaataagattaactctaatgtttgtcgctgttgttctgtatacacacgacgctttccttctgtaaatccttgtggtttcaaaatacctttgcgatcgtaatattgaatcgttcgcgttgtcacattgcataatttcgcgagttctccagtcgaatagttagacatagattccacctcctacaatcaccatagttgatgacccgacgtcacgagcaagtactttttctacattttaaagaaatttattatactaggcgtcttatttttgtgatttcgtaccatgttgatttacaaaatcactcaaattaagcaacactactactaaacgtctactctgttatttcagaatgaatttgttgtaatttatcttcaacttcagtaatctctgtcgcacattctttcagtaaatctcgatacttttccgtctctgcattgtttttataacgtattttatgttctaaacttgcccacatatccatacctatcgttctaatttgaatttcaacaggcaatacctcaacgcgttctgctaaaaagactggaatggatacaacgatatgtaaactgcggtaaccattttctttagggtgctgaatataatctttacgttttatcaattgtacgtcttcttgtttaagcaacatctcttcaatcaaataaatatcatctaagtaattacatactacgcgaattccggcaatatccagtatatgttctttggcagtttctgcgctaatctgtaatcctttacgattaagcttttctattaaactgcgcatttctttcacacgtcgctccatatgatgtatagggttgtgtttataaatgtgattgaaattatcgtctaaaatactcagtttagtgcttatttcctttagtgctgacgaataaatatgatctaactctacgaaacctaataacgtatcaaatgcttcatcaccattttcaaatttacttaaactatttttaaaatcatgtcgcaaatcctctaaatatagtgatggttttcgatctacatacatttttatactaacctccgatatataatcatctttattgtacctaacattttattaagataatactaatacactatcgaactttgggctgatactgaaacagcacaaagaaactcaaacaattcgaattatgtatcaaaaccttcaattataggaagtaattttaaaatgatttaacgcaaaaaaacacctgttaccgttatataggtacaagtgtttaattgatagagatgttatacgtctttaaatgattccacaacttttggatgtggaccatccataagcggttctctttgtcgaacgccaccactttggttgccaattgattcgctatcaaagtacgatttatcttgatttgattgttcttgaatatgttcttcattatcagttgttgcatattcactatccacctctgttttttccattgttgctgtatggaattgtacgaagttctcttcttctaatgctttgatttcttctttcgataacgctcgataccaatctttcgcttttttcgccgcaataggaacaacatctttttcaagatatccttcttttaacattgcattcgcaatttctatcgctttttgccgtttaattacttcaaaatctttccatttttcggggtaacctttcattgtaaagggcatttccttaacctccaatatgttataattcatgttatataccaccataattataaaatgaaacatattaaacacaattttttagactcccgtcataataacttcagacaaacgttagtctgacctgataaatattttattttaaacgttcttgtctctctcacaaaaactattgtgttgaatattcatcattgctgattgaatataattatactgtggtaaatctggtaatatctttatttctaattctgtatttaattctaaatgcttagcgatgttttcaaatgttgctaaatactcgcccattaattgttcatttattgtaagtctatcttcattagccatggctctatttaacataaagctaatttcttctaatgcgaataagctaggataataattttgaatcaatgtcttatcactaaataattcaccattagctgcattataaacttgcgtcatgttatttaatttcacagataggttcatagccgtgtttttctgatacacatcatctttatattggttttcagaaaacaaataatggaagagcgttgcttctttacgaacaacttcagccattacattaggaagcaatgcggatgcggtacgttgtccaaggacaaataaacctatgattgcaatcacaatacccattgcaacgtcaataactcttggaaacgcaatgttaattgttaaattctgtgatgctaatccattcattaaaataacttgtattgtaataaaaactactgcaatcgcataatttgctcccaccaatgcttcagtaaacaatgctgcaatgcccattaaaattactgcaacaggtgttggtattgaaaacaacaatatgactgaaagtactaacacacctaaaatagtacctaaacctcgtgccatacctctctcgattgcatgtatagttgatgttcctagtaatattgtatgtgcagataacggtatccagtatgctttttcaaaatcaaacattaacgcaataaatatcgctatcatcataatcgctgtatatctcaatgtatttctaaaaacaatagagtctaatgttaaattttgataaatgcgtttactatataaaggttttcgcatgtctgcttcatacgcaatacgcgcttcatttgcatgcaccatttcatcaattttcaatatatggttgaataaattttgaaattcctctgttactgtcacttcttttcgccaatatcttacattttcctcactattatctagttgtgcaatgatatgatccatcatttcaattaactcatctggcaatggtcgaatttgtttagcgttcaactctaacagttcagaataaatcccttgggcagatgtgtgtaataataataatttttggaaacgtctacttaatttatcgttacttgaagtagaagtgattaataatttatcagatgctttaaaattatccaccgctgtttttgctacttgtaaaaatgcagatttatcattataagtgtgtaacaacttagatatgagtttaaaatcattttgaattgcttgttcttcagctttgtttttagaaaatacgatcgtgattaacaccatcatagtggcaagtataccgcctactaaaatcgcaaagcctctatataatgcttcttcgggagctataggtaagttaatgggtagactgaatgtcacaatgaagaatgtcgatgacggtccagctatttttaaggcagtaaatatataaaatggtataaccgtaacaattaataatgtcattccaaaaacgagtggcgttttggctgttagcgtaccaagcatcatacatattgcaaacgctaaattacaaattattacagttcgcagcttagatcgcgacggacctttaaaaacataaatatgggctagtgttccggttgcaactaataatccaaattggaaattaccacataagtaaccgattattgcgggaataatcattaacagtccctgtcttacacctttataaaagtctaagttaagtcgattgatttttatgagtgatgtcaaaaagatgtcatttcgacttctcctttccttgtcaaaatatttccataatctttttattagcatagttaaaatgaatttgttgctataaattttaattacgcaacatatgtcattataacaccttatactcaattatctaaattcaaaaacttttaaagtccaattaaaattattttctaatgttatttaacatcgttgaacctttggtcgcccacctttgcgctagttaagatttatttgtgacatgttgaaattattttagtgaatacgatatttagggttagaaaaacattcacatagacttaaggtttatttacttcatattattcctagggttcatgatccaaactatagtgaatttaagaaagtttataaaacatatttgcctcataagcttgaatagttcctatattcgttatttaaaatgacattcgatgtcagttcatttcttaaaatatcgaaagatgattacgtataatatatatagtgacgtatttacaaataatggcagtaagcagtacaaaatgattacacaaaaatttccttctactcgataaattaagaagtataaaataattaaaaaaatacttataatcagacctataagaggcaaacttctaatatatttctctaagttttccttcatatgtataacctcctaaaatttatatgtacttttacaagcgttgcctgactaatgttttaaaactttatttctttacatatatcattttaataacttccctttcatcttaaaccatatccgttttaaaaagtttcaatttcaacgtaaaaaaagcaataagccccaactatgtgaaagcttattgcttgtttaaattatttttctattgctttatcatcactaacaattaaaggttgatctggtttcacatagaaccacataatcacagcgattactgctggaacgattaacaattggaatgtcattgtccaacccaaatgttctacgaatagacctgctaatagcggactgattaatgcacctatattaccccataagttcatccaccctgatactgtaccagagaagttacgtcctaagtcagttgctgcagcccaactcatacccattgaaataccgataccaccaagacctagtgataaccagaaaatacttacatataaatttcctgtgcgtacagcaaagataattgaaactgcaaacacaataaatcctgcaattgcaattacacctctagctacgaattttgaacgacctaatcctaatacacggtcagaaattgcacctgctgataagattaagaagaacattaataaccaaggtaatgaactaatgctcatttctttaaagttaacgtggaatacttctgttaaatacgtcggtaaccaaattaagaataatgtaatgataaattgtacaacaaagtattgaattgcaattgcatagaagctaaaacgtttaaagaaatcattccatggtggtgatgacttttcagtagctacgatatcacgattttccataatgaaacgtttctccgcttcattaaccattctatgttgctcaggtaagtctttggcaataatcgcccataatacagccattaaaatacctactgcaccaaaaatgtaaaatactgcttgccagttaaatgcgttaacaatagcaattgtaactattggtgctaatacaggtccgaaatatgatcctgctaataatgcacttgatgctctacctttttcatttttagagaaccaaaatgaattaaacacagcattagaagggtacattggcgcctcacctacaccaaataagaatctcactaaataaattaaaccgtggttcttaatcatacccgttaagattgtaaatgcactccaccaaactaatgcaattgtaatcatcttacgtggaccgaatttttcagccaacatccccgatggtacttgcattaatgcataacctagagagaagaatgatgccaataaaccaaattgtggttttgtcatccctaaatcatccatcatttgcttagcgatatatgaaatgtttgctctatccatatacgcaataaccccaataaagaagaacgcaagcgcgaacatccaccttacgttagttcgtttttccttcataactattcctacttccctaattaattttttaaaccttaccctgaaacgttaaaattttcggacatctggcatgtccacccctactttgtcacaaaattgtaccaaagttattttttataatattatcagacatggaaagcgtttacaatagaatctataaaaattttattaaattccgcttaacttttgctattaaaacgatataaaggaacttttagttacatagtagcctatcatttgttgattaaaaatactgcaatcctagtgttttaaaacgtatattgcaggctttcttacatattcgacattcattttaaattgcataaaactacattgctcattcattgtgcagcgcctgttatttagatgatcatttgttgacttttcgtacttatagtaagcaattttttgatttattgcttataatacattttaagacaaatgcttgtttcaacatcgcatacgacatcattcattattcatttgaatttatccagtttctatttgtctgcaattgctgaaaattaaaggagcttatttttaataatggaacaaattatcactgaatttattagtcgttttgggtatgcagccatttttatattaattttattagaaaatgttttacctatcgtaccatcggaaattattctgacatttgctggtcttatgtctgttaaatcacatttatcaattttaactttatttattattgcaaccatcgcatcgtttatagggctgttaattttatattatatctgtcgtttgatttcagaagaacgtctatatcgctttattgatcgacacggtaagtggattaaattgaaaagtaaggatttaaagcgagcaaatgattggtttaaaaagtatggcgtatgggctgtatttatctgtcgtttcatacctgtattacgtgtattaattaccattccagctggtgtaaaccgcatgaatgttgtgacatttaccgttatttcattaataggtacaacaatttggaatttcggattaattttactaggacgcacgttgagcgatagctttggtatgttgatgactggtcttcatacatattcacgtattatgtatgttgtcatcattatcgcagtcatttactttgctatacgttacattggcaaacgtaagagagtaaaataatattgttgttagcataaaggcatgaattttaaatttctataaacaaaaagcagtaaaatcattccatctattgaaatgattcactgcttttttaagtttatttggcatactttagctgaaagtcacctatctttatataaagaaatattattattaacatgctagttatagttgtgaagtaaaaggctaccaacggctgagaaatgataccaattaataatgcaccgacagtcattccaatatatctcacaaaattaaatacacctagcactttcccttttatatgttcaaaccttttagaaattatagtagacagcaaagctggcacaataccaacacaagtacctaatataaatataattactgataatataattacatttgattcgtttaaccaaccaaacaataacgtaaatatagcaaatccagttatagtaacacgaagtatcattatttcattatatttttttgacaatcgtttataaaataaacttcctaatataacactaacagtaataggtaaaaacaaaactcctgatattccaacgcctatatcataggtattatttaataatgtcggtaaataaactaatattgaaaagtacgtcaaaaatattaaaaatcccaatgtcactaaagtaataaacactttatcgatcaaatatttttcttcaattttttcagttaatttcacaatccctttttcaacatttggaatatcaataaaaaagataatcagaaataatacgatagatataacaagcaaaaaactaaaaataccaatataatcccatcttgcacctaaagtactccctaagattggtgccaaagctggcgcacatgataaaaatatttgatagttcgccatagcttgagctctaccattatctgtacttagtttggctaataaagttaaagtcacgagaggaataattccgcaaccaattgcttgaaataaccttgatatagcaaataatataaagttatgtgtcactgcacaaataaagctagatatgattactattcccaatcccgttaaaagtacttttttcgaatcacgagaatctatacttctaccaagtacaatttgcataactgcaacgataaatataaaaccgccaactgtcgcatttatccaaaatagtggtacttgaaaatcgtcatatagtctcggaataataggcgtgtatatgttttgaatcaatgatgcaaaaaatgctaaaaatcctagaatatataatctgatattactattagtcatttaaaccatcttctttttttaattcttctatactacgatttaaaaactctacaataactgccatttcatcattatcaaagactttaagtacctcttcatatttttttaccgctttttcatgtaattcatcatgtatataagataatttttttccttcttgtgttaatgaataattaacttctcttttgttaaattcattgtgcgattcaactactaagcctttcgctaaaagtttttttatcgatttagtaattgctggttttgatacatttaacatttcagacaaaaatttattattcactttatcattattatcaatcaactctatgatatgaaattgtgttagagataaatctagttcctcattttcctttttatactgtcttcttttatcggcattttctctttctataataaattgttgtaactttaaaataacttctctcttcatatccactattattcctcctcttcgttagttaaccggttaactatattattgttgtcactcccatttttgtcaaatattgttgtaattaacatatatttacttagttatgcaccatttattccgcaaacttatctcacaaatccatctataatacaaactatcatcttaaataagcagaatttaccctgtcctccacacaaattgttttcgtcactttaatgtgcctactatccaaaaaagttactcataacaaattgcgaattttaataaatgtagcaatgccatttgcatgctacaaaaatactcgtattcatatttatgttttatattattaaagttttttaaatccatatttttataacactttctatgtgataaaattaattttatatataaaaacttaagattcagattatttaatagcaaaggagatagtgatatggatgttttaacaatagaacatttaacaaagaagataggcaacaaaacgattctcgaagatgtatcatttaagctgaaacgcgggcaaatagttggtctcgttggagcgaatggtgcaggtaaaacaactttaatgaaagttatattaggttactctagtttccaaagcgggaattttaatgttattaacagcaaggacagtaaaaacaatatcggtgcattgattgaaaatccaggaatatatccttttatgtctggatatgaaaacttgaagttattgaacgaatcaaaaaacactcaagatatcgataaaattgtctcacaacttcatatgaatgaatacattcataaaaaagctaaaacgtattctcttggtatgaaacaaaaattaggaattgctatagcatttttaaataaacctcaatttattatcttagatgaaccaatgaacggcttagatccaaaagctgtgcgagatgtacgtgaattgattgtccaaaaagcgcaagaaggtgttactttcttaatttcgagtcatattttaagtgaattagttaaaatcacaaactctatccttattattaacaaaggtaaaattgttacagaaacatcggaagaagaacttaaacaatttaaagataatgatttagaaaatgtattactagaaatcatagaaagggaggaccaagcataaaatgggaactttaattaaacaagaatgtttcaaattatttaaaaagaaatcaacttttatcgcacctattgtctttattctactaatggttgctcaaggttatattgctacaaaatacaatgaaatttttacgccacaggaatctttcacatctgcttataatggtttttcatggtttgcatttttattaattattcaagcaagtacaatcatttcaatggaatttcattacggtacgattaaaaatttactctatcgtgaatattcaagaacaactatgattgttagcaaaatcatcacattatttattatttctttaatttattttattattacaattattgcttcaattgttattggttctttattctttaatgatttaaatatatttgaaagtagcggtaatcaattatctttattgaatcaattattattagttagtttaggcacatttgttggcgtttggttagttttaagcttaacgttgctattatcatctgcaacaaattcaacgggtgtagccattgctgtaggtattgttttttattttgcaagttctattttagcagttattcaaacggcacttttagaaaaaatagactggctaaagtggaatcctattaatatgatgaatattatgcttcaaacagttgaaaaaggttttagtaagtcgacgaaattagaacttcatgaattgtttattggtaatattgcttatatttctattttcttaatacttgtagtatttattttcaagaagaaaaatatttagtaacttaaagttattaaatgtctaaatacacacatattccatcgtattccaaaatcattttcaaatcccttcacccaaataatggtgtggggatttttttatccaaattttggcaattccacattttacatatcgtaattttttaggaaactagtgaatataacaaatctcttctctcatttttaaaatagatatatcacttccccacttttacttaactaaactgcaacggctcctaataccaaaatcctgccctctatttttatcaattcaagcatacttattgaaaaatgttaacgttttcttgataatcattgtaagcgcatttattttataaactaacgtttgaaatatactacaggagtgacacgtaatgactcaaattactgaaaaagaattaaaaaagaagtatttagatttactatcccaaaattttgatactccagaaaaacttgcaactgaaattatcaatttagaatcaattttagaattacctaaaggtacggaacatttcgtcagcgatttacatggtgaatatgaagctttccaacacgtattacgcaacggttctgggaacgtgcgagcgaaaatcaatgatattttcaaagagagactttcaactaaggagcttaatgacttaactgctcttgtctactatccagaagacaaattaaaattgattaaaagtgatttccaaaattgcggtcaacttaatgtctggtatatcacaacaatcgaacatttaattgagttaattaaatattgttcttcaaaatatacgcgttcaaaactgcgtaaagcattgccaaaacaatacgtttatattattgaggaactactgtataaaagtaatgaatatcaaaataaaaaatcatattacgaaacacttgttaaccaagtaattgaacttaaacaggcagatgatttaattattggactcgcttattccgtacaacgcttagtcgtcgatcatttacacgttgtcggtgatatttatgatcgtggaccacaaccagataaaattatggatacactgattaattatcattccctagatattcaatggggtaatcatgatgtgctttgggttggagcctatgctgggtcaaaagtatgcttagcaaacttacttcgaatttgtgcacgttatgataatttagatattatcgaagacgcttatggcattaatttaagaccactgcttactttagctgaaaaatactatgacgcagataatcctgcttttaagcctaaaaaaagacctgacaaacacgaacgtttaactcaacgtgaagaaagtcaaattactaaaattcatcaagctattgcgatgattcaattcaagttagaaataccaattattaaacgtcgtccaaatttcgaaatggaagaacgtcttgtgcttgaaaaggttaattatgatacaaatgaaattacagtttatggtaatacatacccattgaaagacacatgtttccaaactgtcaatcgtgataatccagcagaattactacctgaagaagaagaagtcatgaataaactattattgtcattccaacaatctgaaaaattacgtcgtcatatgtctttcttgatgcgtaaaggctctctttacttaccatataatggcaatttactcattcatggttgtattccagttgatgaaaatggtgagatggaatcatttgaaattgatggtcatacttacagcggccaagaattattagatgtgtttgagtatcatgtccgtaaatcatttgatgaaaaagaaaatactgatgacttatcgacggatttagtttggtatttatggactgggaaatattcgtcactatttggtaaacgtgccatgactacgtttgagcgatactttattgcagataaagcttctcataaagaagaaaagaatccgtactatcatcttcgtgaagatgtgaatatggttcgtaaaatgctcagtgatttcggattaaatccagatgaaggacgcattattaatggtcacacaccagtgaaagaaatcaatggcgaagatcctatcaaggctgatggaaagatgcttgtcattgatggtggcttttcaaaagcttatcagtcaacaactggcattgcaggctatacactattgtataattcattcggtatgcaactcgttgcacaccaacaatttaacgctaaagaaaaaatactttccgaaggtatcgatgaactttctataaagcgcgtcgtagataaagaattacaacgtaagaagattcgtgataccaatattggtaaagatcttcaagctcaaatagatattttgaaaatgttaatgcatgatcgttacttagactaaagacgacatttgatgcatgtatcgtgcacttatttagtggtactgtgtttacgcattggctacgcaaacacgatgataaataggcgacctagctacaccgaaaaaaatcccctcactattgcgagtagtgaggggattggtgtatctatgctaattcctgttaactgtattataacaactttacagcaaaaaaatgcaaaatcaactaataaattaatgaaatgaccgacaccctcgcttctactccaatttaacaaaatactatattagtactatatttttcattaacatgtatgttacattttctatattacttaaaattacgaagggacatttttaaatcatgcgtatcttaaaagagtccattattgtggcatttgcctttgttggtgttgtcgttggtgccggctttgctactggtcaagaaattttccagtttttcacaagtcatggcgcatatagcatttcaggcattattgtaacaggactattgattactttaggtggaatggttgtcatgcatacaggtcatcatctaaagtccagaaatcattctgattcaattaactatttcttatacccctctattgcaagaggttttgatattattttaacaatgtttatgttgtctttagctattattatgactgcaggtggtgcgtcaaccattcatcaaagtttcaacttaccgtattggctgagcgcactcatattagtcgcctttattttagcaacactgtttctaaaattcgatcgtttaattgctgtgcttggcggtgttaccccatttttaattgcgattgtcattatgattgcggtctactatttcacaacaagtcatcttgattttactgccgctaataatgatgctcagattcataagcagaaatcattatcacctggatggtggtttgatgcgattaactatgcaagcttgcaaattgctgctgccttcagcttcttatcagtgatgggtagtaaagttaaatatcgtgactcaacgttatacgggggcttgattggcggtttaatcattacatttttactcatgatgattaatctaggtttaatttctcaattcgataaaattaaacacgtagatctacctacattaaaattagcgacacaaatgtctccgtcaattggtattattatgtctgtcattatgatacttgtcatctacaatactgttgttggattaatgtatgcatttgcgtcacgtttcagcgttccattcagcagacgttacttcatcattattattacaatggctgtcatcacttatattagtacatttatcggtttcatttcattaattggaaaagtattccctattatgggattgttcggtttcatcttactcatacctgtactctataaaggtttaattaagcgtattaccggcaaatctcatatcgattaaaatatctatactattgtaaaatttagtacagcacttcaaaatcaaaaaagcgggcagatgaaaagtaaaaatcttttccatctgtccgcttcttaatagaactgttatttcccaagtatttgttgaccagccgttaatccagtttctgtaatttcatgaccattcacccaaacttcttcgacttgtgccccacgtgtcttaaacaagttaatgacttgttcacttgcagctaatggcacaattggatcatgtttccccatagaaagcaacacactgacatctgataaattctttgttgacgttacttcaactgggtataacggtgcatataacaatgcttttttaaatggtgcttctgaacgcaacattaagttaatcgctatatttgatccatttgaaaatccaacaagcacagccttttcaatatcaaattcataacgttcagcagcttctttaatgaacgttaacaattcttgtccacgaaatgccaaatcttcttcatcataaacaccttcaccaagacgtttgaaataacggttcatcccattttctgaaacttgtcctctaatacttaacaagtgataattttcattcaatgcttcgcctaacggtaataaatcgaactcatcaccacctgtaccatgcaataatattagtgttggcgcaccattttgtccttctctaaaaatatgtttcatcacaaatcctcctcattccaattaaccatgttgacgcttcgtattaaaaggtctaacttccgattcaatatattctcttttattttctaaaaatggtggcaatgataaaccttcacctaatgtttcatacggttcatcttccataaatcctggtccatctgttgaaatttctattaaaatatgccccacacgtgcatataatgcttcaaaatagaaacgattaacgatgcctgagttgttaatacctacctctttatatttcgttgcccacgcttctattgcatcatgatctttcacacgaaatgacacatgatgtacctcaccataaccttgacgtgctgctggccctttatcaccttttattaagattacctggccaccattgccgccttcgccaacttcaagtaatgcgacattatcttcatgcgcaatagttgtcataccgtaaacagtctctaaaatatttttaaagtcgtcaaaataacttactttaatttcaatgggtcctaatccataaatcgctttatctactggaaccggtccattcttccaaggtacaccaggtgctaccccttcatttaactcatctgaaattaattgatacacttggccatcgacttcttcaaatggcaacacttttttaccaaataattcttgaataccttcgtgtttaacaccaaactcatcaaagcgctgttcataatacattaatgcgtcatcgttaggcactctaaaagacggtcttgtaatggaatttgtacctgcctgcccttttgtaatatttggaaaatcaaagaacgtcatgtctgtacctgccgaacctacgtcatctgcaaaaaagtatgatacgtataaatatcatcttgattgactgtctttttaactaaacgcatgcctagtacttctgtaaaaaatttataattacgttctgcatcatctgtcattgctgtaacatggtgaatacctaatagttcatgattatttgccattttatataccctctttgtctttttaatgtatttatctcgaaatcgagatattttaatgtaaatttttagtgcacgctttacacttctgtagattgtgcacttagtttcttaaacgcttgttgtaagattgttaattcatcctttgttaacacatcaaacgcttttgttaatgtctcagcatgcttagggaaaatatctgccatttgactttgacctttttcagttaaacaagccatatatacacgtttatcatctttatccttttcacgtgtaatccaatctttgtcctctaattgacttacaacatatgaaatgctgctacttgcaattaatacgcggtctctaatacgttgaattggttgtggacctttgttataaagcaactcaagcactgcaaattcagtaatatttaatccataacgctttacgtcttcttttgtaatttgctctaatgtgtctaatgctctattcattccgacaaagacattgagcgattgtttcgttcgatccatatcatcaccaacttttattttatttcgatttcgagataaattatatagctgaatagatttaatgtcaagatacgtgttttcatctttatttcaaattgcgcttaataaaaacgactacataaatgtggcaatgtcgtcacatgactgtcatgcaccttttacttcgtttaagttaaaatagaatagggaaatactataatcaatcatgataggagttgatatgtatgagtaaccttgaaattaaacaaggcgagaacaaattctatataggtgatgatgaaaatcatgctttagctgaaatcacataccgttttgtggataataatgaaattaacattgatcatacaggcgtatctgatgaactcggtggtcaaggtgttggcaaaaaactagttaaagcagttgttgaacacgctcgagaaaataatttaaaaattattgcctcatgttcatttgccaaacatatgttagaaaaagaagattcatatcaagatgtatatcttggttaaataaattttgcgatggtgcaactgtaccatcgcttttttgttcgcatcaatataaaattgcaaaacgactagttattttgcatttcaaactttatgctatcaattcattttcttttctggtatactttttatactaacttatagaaaaatagaaaacgaggcgatgcataatggcatttcacgataaaacagcaacacaagtgacaaacattgaactgaacgtaagagacttagacttaatgacaacattttacaaaagcattttaggactatccgttaaaagttctgacgataacacaaccgtattatctgttgggactggtggccatactctaacgttacatttattagaagacggccgtcagacttccccacgtgaagcaggactttttcatatagcatttttattaccaactactgaggatctagctaacttcttatatttcgtggcacaaaaaaatatgggcattggcgctggtgatcatttagtaagtgaagctttatatttcaacgaccccgaaggtaatggtattgaagtctatcgcgatagaccttcatcttcatgggaatggcaaaatggcaaagttaaaatggatactttagaagttgatagccaaaccttattaacacatcgtactgatgaaggttggcaaggaatgccagcaaaaggcatgattggacacttacatttaaaaacacatgatttagacgcagcatatcaatgttacattgaacaattaggattccaacatgtgtctgattttccacgtgcgctatttatgtcaacgaatcattatcaccatcatattgctgctaatacttggcaatccaatcaagcaagacaaaacaatgcacaaagttatggattaacacatgttgatatttatcaacccgacgcctcaacacatacatttacggcaccagaagggtttgacatcacagttcattcaaatactgaccttgttccagaaaaataatcatccatactttattaatacaattttttcacgcaaaagcctgcgattcatttatgtaatcgcaggctttttttattgctaactttttaattttatatatttagacatactgtattctatttattcttttggtccaacccattcaataacatcttcatatgcttggcgtgttttatttttcggtggatcttgttgtctgtagccaaatgcaaccatcactgataaaccaaattgctcagtatctaaaatacctttatttgctaaaatgtctgtcactgtatccagactaaaaccttccatcggacatgaatcaatacctaacaatgcggctgtcgtcatcatattgcctaatgcaatatacgtttgtttacttgaccagtcatacaaggcttgatcattatcagaaatatggaaatctgcttggaatgcatcgaatttttgttcaacagctggaatcgtttgtgcctcatattttttaatatctcttaacatatgttgtacatacggtgatcttgacgttacatttttacgcgcaaaaattagcacaaaatggctcgctgtatctaattgttttgctgcgccccaactgtgcgcttttaattcatcacgtaacgcttgatcttgaatcacgacaaacttccaaggttctaacccaagagaacttggagacaatctacctgactctaatattgtttcaaaatcttctttcgaaactttcttttgtggatcgaattgcttagtcgcatgtctgaaatgaaatgcatccataattgtttgattcatattgctcattgaacatagcctcccatttttatatttattgctatacaaattatacttcatgttttaaaaagactaaagtaatccgtttgcaattcactataacttgtgcacatgttataagttttctgcaataaaacacacttttgaattttgggaaatttagtgttataatatatttgtgatatttttcacaattaaattgtggcgtgattttaatgtgcataatctttaatttcactcatttacttttcaatcttttaaaagcgaggtttttaataatgacaaaaattatgttctttggtacgcgtgattatgagaaagagatggcattaaattgggggaaaaagaataatgtcgaagtaactacttctaaagagctattatcaagtgctacagtcgatcaattaaaagattacgatggcgtaactacaatgcaatttggtaagttagaaaatgacgtttatcctaaattagaatcttacggtattaaacaaattgcacaacgtactgctggatttgatatgtatgatttagatttagctaaaaaacacaatattgtgatatctaacgttcctagttattcacctgaaacaattgcagagtattctgtttctatcgccctacaattagtgcgtcgcttcccagatattgaacgccgtgtacaagcacatgattttacttggcaagcagaaatcatgtctaaaccagttaaaaatatgactgttgcaattattggtacgggtcgtatcggtgctgctacagctaaaatatatgcaggatttggtgctacaattacagcttatgacgcctatcctaataaagatttagactttttaacttataaagatagtgttaaagaagctattaaagatgccgatattatttctttacatgttccagcgaacaaagaaagctatcatttattcgataaagcaatgtttgatcatgtgaaaaaaggtgcaatcttagttaacgcagcacgtggtgcagtcatcaatacacctgatttaatcgctgcagtgaacgatggtactttgttaggtgctgcgattgatacttatgaaaatgaagcagcatacttcacaaatgactggactaataaagacattgacgataaaacattattagagttaatcgaacatgaaagaattttagtaacaccacatattgctttcttctctgatgaagcagtacaaaaccttgttgaaggtggtttaaacgcagcattatctgtcattaacactggtacatgtgaaacacgtttaaattaatatatatatttaaaagcaaaggcgcgccatgtgcctttgctttttattttgtatatctgtatcaaaatcgatttgattaaaatccgctttattttatcatctattcaaatgattttagtgcgcttattttactatggcattattgcctaacctgtttgagatatattaatatttgatgattcgtattcaaagttttcatttaacatgtatttagtatcatgatagctgcttcattgatgatatactacctactttttcaacacttcttgttcgataatcgttaatacaccctgcttatcattacttggagcgacagcagaggcaatattgaacaattcttcatcatgactattttccatcacataactatgcttagcgaacgctaacatatctttatcattattcgcatctccgaaggccatgagctctgaaggagacatttcccatttatctaacaatcgttttaatgcctgccctttagtcatgtttggcataataatatcaatgctatcgtgcccacttgagacaagtttaatatcattgctgaattgcgttgctacttcttcgtcaacattcggatgcgtctcacgattaatattaaatgctattttgacataatcatcctcaggtaattgctgtagactgtcaatttcttttaactgatgataataaaatctcgtatcttctttaaacgcttcagaagtatgttttaaaatatacgcgcttttcaaaccacagatgacgagttgatcaatactttgcttcatatttaagtaatcgacaacctgttgaaacacctgacgattaaagcttttataattatataactcattgccattataaataactgcaccattttcagaaataaaatacatatctctatccccgaaaatagacttcaacttcgcatattgattgccactcgcagcaataaatgtaatatctctatttctaagttcagtaaaaatcgcttcaaatctaagtttatcatatgtcttttttgaatctaaaaacgtcccgtccatatctaccgcaatagccttaaccatgattatcctcctcattgctcttttagtcgtcttcattatatccatctcatgacaagcaatgaagtttgtcataccacaatgaacctatattcacattttgaaattgctttcatatatgcaaaacacattacactggatatagcattcagaggtgaacataaatttcagaatattgtaaaaatataacgatatatttatcatttagacaaaatatagtgtgatatactaatttataacatctatacataatgtgaaagaatttttaaaaatacaattaaatatcggtgtaataaatccctttatacataggagttgtatacatgaaactaaataactattctttaaaagttaaaaacaaacaactagttgacaattgtgatttaaatttctatcttggtcagatcaatcacattgttggtaaaaatggtgtaggaaaatctttattagctaaagatttcttactaaatcatagtggaaatatccctaagtccatttctcaaaatgtaaccttaatatcaagttcatcaaatattcctaatgatataacaaaagattttttattatcattgttaaaatcaaaatttgaaaacaatcgacaaacattcgataagatttataacatactaaacatcgaagcaataccgtctaacgtactactaaaaaacttgagtgatggtcaaaaacaaaagcttaaattattaagtttcttattggaagatcatgatttaatcatattagatgaagttacaaacgctttagacaagaaaacagttaatgaaatttatgaatttttaaatgattttattcaaagccatcaaactaaaactattatcaatattacacataatttatccgatttaagtgctttgccgggtaaatactttatttttaaagaccttcaaatagaagagtaccaatcaaaagaagaagtcataaatgattacattaatttataattgaggtgtccactttgaaattagaatttaaaaaaagtatttccaataaaattatttacacgcttgttgtgctattcacattccttttcttacttgggtattttttaccaataggtatagacaaagttaaaagtttaagctatagccagtttttcttcagttcatatactgttgcaacgcaattagggttcttactattttcatttgttattgcatattttattaataaagagtattcgaataaaaatatcctgttttataaattgattggcgataatatctttaccttcttctataaaaaggtagcagtgttattttttgaatgtttagtgttcataattctaagtatcactattatttcaattatatattcggatttctcacattacttactattaataatcttattttcactcgttatcttacaatatatcttagttgttggaacgattagtatggtttcacctaacattttaatcagcttaggtatcagcattgtatattggattggttcagtcatcttagttgccattaataaaaatatatttggtatcgttgctccatttgaggcgagcaatacgatgtatcgtgccgtagaaaaaatattgaataacgagtcaacatttatgtgtcctactgaaattataaatatagtatcattcttcgttcttctatttatagttaatactattgtcttattactaagtagaaagagatggttgaaaatcggtatgtagtataaaaaaggagcggtatacattgccgcttctttttattatgtatttttacaatctccaccaatgacacgtcgtcattgctacctcataccaaacaaaaaacagtctcgcaatcaagactgttttccactcaatatattcatccattagcgtaatagattatttgacttctgtagctacaaagattttacgtttttcccaaacgcctgtcttttcattgtaatcatcacaagtaattaatgttaattgtttatctttacctttttgttcatctagaactcctacatctgtaggcttaacatctcttatacttgtcattttatacttacgtgtttcattaccaactttaaagtacaccatactaccttttttggctgctttaagatttgtaaattgatagttcggacggtcaatgaaagtgtgtcctgcaattgaaatattttgatcatctagtgattcattttcttctgcaaagcttacacctctatttaattgttcaggtgttgctgatcctggatatactggttctttaatatcagcatctggaatttcaatatagcctgccactttcgatttatctttcggaatttgaggtttagcttgctgctttttatctttactcgcctgttcttttacatttttatcatattgttcaatcttttcatctttatctttatcgtgaagataattatcgatatgtggtttagcaaacaaatatgctgccactaggataagtaccacaccagcgattgtcattaatcgatttgtccattttttcatacgttaaggctccttttatacatttcacaatgcctgttaacatttcatatagtataccattaatttcaaaatgactcatagcaattcattttatactataaaatttacatgtatacttttacgttagatttcattacacatatttgcattcaaataacgaaacgcttttaataattactaagggggaattgatatgattagatacgctaaaaaagaggatttaaacgctatattagcgatatacaatgatgccattatcaatactacagctgtttatacttatgaaccacaaaccatagacgaacgtgtcgcatggtttgaaacgaaacaacgtaagcatgagcctatctttgtatttgaggaaaatggaagtgtcttagggtttgcgacgttcggttcatttagaccttggccagcatacctatatacaatcgaacattctatttatgtcgatgcttcagctagaggaaaaggtattgctagtcaattactacaccatttaattgtggaagcaaaagctaaaggttatcgtgcgctagttgcaggcattgatgcttccaacaaagcgagtattcagttgcatcaaaagtttgcttttaagcatgccggcacactgaccaatgtaggttttaaatttaatagatggttagatttagcattttacgaattagatttacaagactagtaatgtttgaatcacataatataaacaagacaaccatgttaattcccttaacataacaagccaacatataaaattttaaacttctcaggggagtgggacagaaatgataaagagccactaatgatttattatgtagtggttcttacacattagccacagctaatgtgtacttaaaaataggaatacatgagtaaaactcatgcataagaaatactaatttctatagaaaaagtatttctttatcgtcgtcccaccccaactcgcacattattgtaagctgacttttcgtcagcttctgtgttggggcccaaaaagcttgttacaagcgcattttcgttcagtcaactactgccaatataactttgtagagcatattacattgatttacattgtcccttttatttattcttttcaaatactatccccatagctttgatttaacgctttttctcaataacaaaacgaatatagtagaacatgaaaacgataatcatgctgagcgataaagatttaaataatagattgacccacgttccctcagtcgtatatccatatgtaatcgttgtgttaatgatgaatgctataaagatgattgatagtcttagcatatcatcactccttttaagttattttagatatacgggggcgcttttgcaatcactattttgattagtatgcattttccataaatctttcaacttcttcagagataattaagaagcatctatctggtactaatgatccagacagatgcttcttttttatcaatattttattgttatctcattaattatttttaaccatatcttcagctgtgccaaagattttacgtttaattgcttcgccagttggtgtgcctgctagtccacccaatccagtttcacgtaatgatgcaggaaggttacgaccaaccttatccattgcttcaataacttcatcaacagggattctactttcaatacctgctaatgctaaatctgctgaaattaaagcgttacccgaaccaattgcatttctcataacacaaggaatttcaacaagtccggctactggatcacaaactaaacctaataaattacttatcgctaatgccatagcgtgcccggatgcttctggtgatcctccgaatatagctactgctgcagctgcggccattgcagatgctgaaccaacttcagcttggcagccacctgttgcaccagctacacttgcattgtttgctacgacacgcccaaacaatgctgaagtgaataagaaatcaatcatttgctcttctattaaatcatgtgttttttctaatttaaaaagtgcaccgggaatggtacccgaggaaccagctgttggcgttgcacaaataatacccatcgcagcattgacttcatttgttgcaatggcacctttgactgcgtcaatcatttcatatccagacaaagcatgatgtgtttcattataatcacgtagtttagcagcatcatgaccagtgtagcccgttacactttcaaccccatcacctgtcgtccctttgattactgcgtctcgcatgacatctaaattttgtttcatttgcgctcgcacttcatcacgtgatttaccgcttaattccatttcttctttaaccatgatatccgcaaatgacatattattttctacggcataatctatagtctctctaattgaatcaaacatgtttattccccctctaatttatataggaaacgtttacgtcactgtatttctctttaattgtatttaatgttgattctgagattgctttatttaatggtattacaaccaagcatttatcttcatctatcttaataaattcatctttacagtctaatttcatatcgttgatatcattgatgaaatgatttacttgtgctttagtcatatttccgtcaacaactaaaattggtaatccatgatttaaatctacttctagtccatttatatgaatacctttaattttaattgtaccaccaccgattgaaataccgataatttcaatgtagcgaccatcattacgagatgatttgatataagcacagtttggatgttgaccaatactatcgccttcttcttcgatgatatctattttaataccatcatcagctgcaatttctaatgaagatttaattcggttatcaaatgttgaatatcccattgctccacccacaatagcgacatctgtaccatgtccttggtgtgtttgagcaaatgattcataataatgtatttcaatatttttaggaatatctcccaatattgcgcgtgctgaattcccaatctttactgcaccagccgtatgagaacttgaagggcccatcataactggtccgataatatcgaaagcactttgataatcatagctctttgccataattaaacactctccttaatatgattctttttgctcggcattttaaagttgatattcattaaattaaacttattaattagtgttccaataatataggctaagacaatgctgacaataatcactgttgcgattgttacaattgatgtcactgcattattaaagccaaacaatacgatggcgcctgcaattggtgttgccatacctttgacacctattactagtccgctaaatgtcacgatacatgcgttgacgaccccaatcagtgcatttgtaccatatagttgtactggatattgcgctattaaatcaatttgcgtcaatggctcaatacaaactgcaaatgcttttgacggtccaccaatgtttaattttcggaataaaataaggttaacaaatgagctacctgtacatgttagtgctccaatagccataggaacacctgtcagtcctaataaacttgttaataccattgaacttagcggtgtcatacctgtaacaggaatcactagtcctaaaatgaccgctaatgcatatggattgttatcacctaccgcagtgacagcactacctatttgttttaatgttgctagcacaccaggtgtaatgattgatgcaagtccgaaagcaattgctggtgcaaataagatcaccacaattaagtccaagccttctggaactttcttttcaatccatttaattaaaaaagctacgccataagctgcgatgaatgctggtaataatttaaagtcatgtaatactaaaccaacaataaccgcaaatactggtgcaacgcctaagtttaagcacgttagaatacctactgcgataccgcttaaacttcctgctaaatccccaatatcttgtagaaatttaatatcaaatacgccaccaatagcgtaacttaagaatgcttgtggtagaaatgtcgcacaagctgcaccggataatgcttgtagtccttgtttaccgtacggtgcatactttaaaaatagcgtcatgatcactaaaaccaagactaatgtgcctacacctaacagaatatccatttcccaaaaacctctctctatgtttattttattttcagaccataaacatcgtacacccttaagaaaacgttttcaacttttatctgttatcaaatcaaatatttaagtgaaatatttcatatttgtgaaagatttttaaaatggattgtttcaaaaactacttatgttgtcattaatatttactaattaactttttactctatatttcaaacagttgtgtgacagttttttgataacttttttacatctgaaagtgagtaatatttctaaaaatctttaatatttatacactttatctttcgaactatttattttttgtttttgtgctgtgtttataaaaccacacactatattcaaaaataacttattacacatatatttgcaataagataattaaagtaggatattatttttagttttctgataggaatgatgatagtctataggttgaatctttactttttttaaagctaaatttacatcaacttaacaatggctggttatactgaagatgaaaatatttagtataacttagtggaggcgataaaggtgcaattgagtcattccgttaaagttgcaatttctatctatttagcacttatctttataacgttcacttcttatttagtcattattttatatacgagtatgactggacatgatgtatcacatttcgtgttagatagtcagcattctcatcatggatctcttacgcaaaaacatttgagtcttcctgaaatctcatttaaatagtttatcctctgtgtttcaacattcatttcccatatcgattcatttatctatcatctagaccactacatcttagatgatttttttattttctcatttcactctttcttaaaagtcgatataatgaattaaatcattatcatacaccgacatattttatgttgttggtgttaagttttaaaggggtgagatacttggcgaataatcattcagctttgcgtttaaaaggaattatacttgccattgtcggtgcttgtttatggggattaggtggtactgtttctgatttcttgttcaaatataagaatattaatgtcgattggtacgtcactgctcgacttgtagtcagtggtgttttcttacttattatgtacaaaatgatgcaacccaaacgttcaatatttagcgtattccaagatcgacgtatgttaggcaaattacttatcttcagtatactgggcatgttagttgtacaatatgcttatatggcatctattaatacaggtaatgctgcgattgcaacattactacaatacattgcgccagtttatattattatttggtttgtcataagaggcgttgcaaaactaacattatttgatgtgcttgctattatcatgacactattaggaacatttttattattaacgaatggttcattttctaatttagtcgtcaatcctgcaagtttattctggggtattttagctggtgtagcactcgctttttacacaatttatccttcagacctacttaaccgcttcggttcgattctaattgtcgggtgggcaatgcttatttctggtgttgcgatgaatttacgccatccaatttggcacattgatatcactaaatgggacatatcaattatattatttttaatctttggtattatcggtggtaccgcactcgcattttatttctttatcgacagtttacaatacatatcagcgaaagaaacaacattattcggaactgttgaacctgtcgtagccgttattgcaagcagtctatggttacatgtggcattcaaaccatttcaaatcgtaggcatcattcttattatgattttaattttattactatcacttaaaagacaacctgaagcattagatgaataagaaaactctgataatcactttagcaagtaactatttttaacaacgtagttaccttataggtgatatcagagttttttattttaattaataatatttttcacttggtataaaaagcgtcggcgctctggtatcggaaatactggataaatatggaattggtaatatccaggtataaagtcatgttcgataccttttgcactcaacaattgcgataagttcaaagcatctgggtacagtacttcttttgtgccaacagttaatgtaatacgacctaaaccatctaagtcaccattaattggtgatactttgtagttatctaaaggtgtgtcccctgcccattgttcagctaagaacacactgccatccacacctaccattgggtctttctttaagtagtcaggaatttcaggatgctgcatcgttgcatctaaaactggtgaaattaatacaatatgtcctggttgcacaatatgtttttcttttaacaattgagcaaatgataaagcaatttgaccgcccgcagagtcacccattacaacgatttgtttagaatctgctacttgattcaataaatcatggtataacttttcaaaaagcacatacgtcgcttgataatcttgatgcggaatcttcggatatactggcatgatgactttagcattgagtgtttctgcaagttcatcaataaattcgaaatgaattttgagtgggtcttggaaccatgcgcctccatgtgcgtataatacaacacgttgatgcttatcttgtttatcattaacggtataaacggttgaaccgtagtgcttatccactgttactggcatcttaaactgataattggtgccctcatattcacctgctgtctgtggcgccattttttctaatgctttcatcgcttcttctttatacataaaacgacgcttagctctagataatcgtataccttgttctaacatataacttttcacactgcgtttttctttaattctaatatgtgcgtatgctgctactaaaaatccaaacgcaagtgtagaccattttttacgcatttgtcgtcactcctctttgatgatttctactatagttctactgtaccatgctgattcttattactaccaatatttactgggaaataagttatgatgtctacataatcttagcaatgctaatcatttgcgatattaatgctcatcgacatcgttatttacactatcattcatttgcttaagatgatgttcaaaacgttgcatatcgataaaacgcccttgacgatgcatttcttttccattcataaaaattaaatccacaggtacagtgaaaatatttaattctccagcaatagcttccacctgactttgattaatcacagctaatggcacattgggatatgattgcatcaagtcttcaatttgtggtaaaacggcatgacacacgctacactgatcgcgcatgacatgtacaactgctaacggatattgatgaataaattcacggaatgcttcgacactatttaattgcttaaccatttcgaacaccttcttactttttatattttaaaatgaagtcattattttgttgctaaaatgtcttgaaacacttgtggcacagaggttatcttcttatcgctcaatctgtaaaaaccgcctgtctgtgtaccaatacaatgcacgccatgtgcggacacaatttcaaactgaaacacccatttcatcttgcttgctttaactaagtaaatacgacctactggtttgtcatgtattgtgacaggtactttatactctgcttccgttttcataagtataggtgaaatgccttgattgatcattgttgagtaattcatgtgctgattaataaacgctgttctcaaatcttcgaaccatctaatataaacgatattactaacgacacccatcgcatcaatgtcgtaaccattcacttcgatttctttctctgcaactaatagaccttctgttgtcataatgacaaatctccttatcttacaaatagatttaaaatcatgttaatttatttttattactttcatgataaaaatacaagcaattgaactttattacggaaaatcaaacttttcaatgacgttattaatttgactagtcgtgaagatgcatttttctaaaatgtacaaaaagtacaatccctactttctatcccccaaactaacatctatgccattgctatacatcattgcgcactaaaaaggcagtagcttcattttaagctactgccttttgtaacgtattctctttcaactcgctacttcgcatacgcactacgaatgactaaaagttcattcatttgatatgctgtttcatttttaatcattatttgactgtcataattagcttacctggatcagcatcttgtacatcttcaatgacaagttctttattttcaagatttgtaataatcattggtgtaacgatgcttgatgcgtgtgctttcaagtatgctaaattcactttcattaatggttgaccttgtgttactttttcatcaacgttaatcagactttcgaatccttcaccattcagtttcactgtatcgataccaatatgaataagtacttcgacgccactttcagattctaatcctatcgcatgtttcgtagggaagattgttttcactgtaccatcaaacggtgctacaatttcacctttttcagggataaagccaacaccatcacccatcattttaccagcgaatacttgatcaggtacttctgataatggaatgatttgaccgatacctggtgcatagatgtctgttgttccaagtgcttctacgtgaactggttcatctgacatttcttcagtcactgtcgtttcacttggtttcgtaatttcaccactcataatcttggccatatcatgtttaatttgatctgattttggaccaaagatagcttgcatattgtttccaacttctaatacacctgatgcgcctaaagctttaatacctgctacatctacttttgatttatcaaccacttctacgcgtagacgtgtaatacatgcatctaaatgtttaatgttttcttttccacccattgcatctaagacatcaaatggtaattttgcgacactagagttacgaatttcagtttcttcatcttcacgacctggtgttttcaatttaaacttacgaattgcaaagtcgaataagaagtaatacacgatagcatatacaataccgactggaataactaataatgcgtgtgaacgatcccagtttaataaaccatataaaatataatctatgaaaccacctgagaatgtcataccaattttaacgcctaataaatgcattactaagaatgatgtaccagctaataatacgtgaattccataaagtactggtgctacaaataagaatgaaaattctaatggctcagtgataccagttaaaaatgcagttaatcctgctgataacattaaaccacccacgacttttttacgttctggtcgtgcatttttataaatagcaaatgccgccgctggtaaaccaaacatcataaatggatatttaccagtagtaaatgcaccagcagtaaatggtacgccatctttcaattgtgccatccaaatacgttggtcaccacgaaccaattcacctgcgtgatttgtataacttccgaattcaaaccagaacggtgaatagaaaatatgatgtaaaccaaatggaattaatgagcgttcaataataccgaatataaacgttgttaatgttaaatttttatttaataagaaattcgataaactatttaatccatcttgaattggtggccacgcaaagcttaaaagcacacctgttgcgattgctacgaccgatgtcacaatcggtacaaatcgtttacctgcaaagaatcctaaaaatggtggtagtgtaatattataaaatttgttgtaacaccatgcggctaaagcacccatgataataccaccaaacacacccgtttgtaacgttggaatacctaatactaaagcatgtgctggttctttcgctgcttgacttaattcttttgcccctttggcatatgagaaaatgtcatcaattgtaatgtgcaacactttccccattgttgcattcataattaagtaacctactagcgctgctaatgctgcaacaccgtctcctcctgctaatccaagtgctgtaccaactgcaaataataatggcaagttatcaaatacaacttgtcctgctgcttccatgaccgacgaaatcattacaatgatatcgttttttaaccatggtgcaatttctactaattgttcgttgtgcattgcgttaccaaacgctaataaaataccagctgctggtaaaatcgcaacaggtaacattaatgctttaccgatacgttgcaattgtccaaacaatttcttaaacatataaacatcccctatctcaatttccgcttccatgtacaaaaaaagcaggcatgaacaaacaagactattctcatagtgcggttgtttgctcatgcctgcattaccagtaacacgcaagtgatatctaattcatagctattatacatatttgtaaaagcgttttcaacaactttttcacaattttatcatcaattcagtacgatcatttgtgataaataaacaaaacggcaattcccattttgttgaaatagaaattaccgtttttatagttcaattcaattgtgataacctttcaatcagttataagaaacgttttgctgccactgaaattggtggaatttgatctaaatctaaatgtttatcttcagtaattgatctaaatgcccacttaccataaccaagcgcttcttcatttacaattttacctggtaatggcgcagcattaggatcaacatatacatctacaatcgttggtacatcttgtgctaatgcctcttcgactatagcatctacttcgctagcactcttaattgtataacctttaccacctgctgcctcagcaaattttgcatgatccatatcagaaaaatcaactgcatattctaattcaccagctgcttgttgttcatatttaataaatgctaactgtttgttattaagtacaaatacagttaaaggtaaatcatattgtactgctgtagcgaagtcttgcattaccatttggaatgcaccgtcaccagcaattgcgatggcttgtctatttggaaatgcaatttttgatgccattgcacctggaagaccgcaacccattgtacctaaccaacttgaaatgatgaacttgttatttacaccaaggtttaagtatcgagttgaccaaactgttgctgtacctacatctgctgaaattactgcatcatctttaataaatttgttaattgatgccattaaacgttctggacgtaatggtttgctattattatttttatcttgttccatccatttatcccaaaccgctttacgttctaacgttttgtttaaaaatggtctttccgcaacatgtttaatattttcagttaactgatgcaatgcaattttactgtctccaacaattcctacattaatattaaaacgatgtccgatatttttaggatttgtgtcgatttggattgctttaatatttttcttaggtaagtaatctacatatggatagtttgtacctaccataattagtaaatctgcatcctgcattgtctgatatgaggtttttgtacctattttacctaagttaccaatactgtatggatggtcatccggtaagattgtcttagcaggtaatgaatgaacgaccggaatttttgccgcttcaacaaacgcacgtagctcatctttcgcatgttttgcaccaacaccaatcaacataaccggctttttactcttattgattaatttaacagcttttttaatgtctttatattttggtgatacaacagttggtcttgatgtatctactggtttattcgttgtatctttaattttttcagttaataagtcgttaggacaaataacaacagctacacctttttgttcatatgccgtacgaattgcttcgttaacaatttcaaacacattgtcacctttttcaatttggtgattataaacggctacatcttcacataatttttgtaaatttgtttcttggaatgctttcgttccaagtgctgtactattcgtttgtccagataatattaattgcggtacattatccattttggcatcatacataccatttaataaatgaattaaaccagggccaccgatacttaatgccacaccgattttaccagttaattttgtgtaaccagcagccgctaagcttgctacttcttcatgacgtacatgataaaatttaaattgatctctcactgtacgtaaactatcgactactgcgtcgattgagtctcctggaataccatacaagtgatctatatcccatgcttgtaatgctttaactaatgcttcatttgcttttatttttgccattattactaatagcctccctttctgtctatcattttaaatatctaaattaatagaataataaaattagaacaggtattaacactgaactaataactgcagttaaaatcatcccaattgaactaaatgcaccggattcaatatccatttctagtgctttagctgtgccaaatgcatgtgacgcattcccatacgttaaacctttggcgatagaagattcaaatcttccaaatcttaataacatcgaacctaaaatactaccgattaaacccgttgtgataataaaaagtacggtcatcgtatctgtaccacctagttcatgtgacacttcgatacctactgcggctgttatagatcggggcaataacgttacaatgacgtctttagaatagccaaatgctttaagtgttaagaacactaacatgaaattcagcatgacgccagttaatacacttgcaaaaatgatagagacattgtctttaattttctctctatttttataaagtgggtacgctaaacatacgaccgttgcgtttaaaatatggttgatccaactgccacctttcatatacccgttataactaattccaaagataagtaagacaaaaataattcctaaagatgcaattaatgctggattcaaaaatgggttcggatatttttgttgtaaccttttagcgaaataatataaaacgacagtcaacaaaatcattaataaggcttgcacgtaatcattcataagcgtctacacctttacgatgtttatgtttaacagacattttttcagcaatataacctgaagataatgcaacgatacatgttcctataataatgactgcgaaaaagagtatataatttagcgtaatttcggaagcaacatccataatacctacaactgacggtatgaagaaaaagaccatcgtctttaataaaaagtttgcaccgtcttctacccaagttagcggtacaatcttaaattgtaatagtaaataaaataaaaatagaccaacaatactgccggctaagggaagatgaaaaatcttttgaatttctgtgccaatataagtaatcacaatgatgattcctagttgtagtagtagtttgattattaattggactttgtgcatggcgccatccctttctaaatatgtctaaattgttacaataactattataaagatggcgtacacaatataaaaatactctttttttatagtttgtattactattttctatggaaacgctctctcaatttcacttcattttcacaaaaaaacactcatcatttcaatgacccacgtaatgatgcgccttaaataatgagtgctttattaatatgttagcctaaacgatctttcaaaaattctatccatttcgttgtggcatgacttaattgtttatccttcttccaaacaacacctaattcccaatgtacatgcgcatcttcaatgcgtagcagcttcacatctccatttagttgctctgaaattgatgttggtaaaatactaatacctaattcattcgtaactaaatcttctataacatgccattgtgaaatttgcgctacagtattcggaacaaagccaacgtttttagcattttcaataattttatcattcaagtaaaagtctttattaaataaaatgaagtcttcacctgctaaatcttcgagtttaacagtttcatattttgcgagtcgatgctctctgctcacgataagtcgcaaatcttccttatctagggtagtataatcgaaaatatgatgatcgactggcaaagtggtcacgcctatatctacttcatcattgataatttgctgttcaattgttttgccgccattttctattaaattatatgtaacatttggatattgttgatggaatgcaccaagaatattgataagaatcttcatattcatgactgccgacatgcccatgtttatatgccctgtttccagtccattcaagcgttccatttcagatggtaaataatcatacagtgcaacaatttctttacttttctcataaaaaatttgacctgcatcggtaagtattaaatgtcttttacttctatcaaataagggcgtgcccatttcattttcaatatctttaattgctttactaattgtaggttgtgcaatatataatgatttggaagcattagtcatgcctccttgcttaacgacttcaataaaatatttcatatgtttgatatccactaacatcatcctaactatttcaacacgtttatttcattatacacaacttcttaaacattcaataaatttagatttataaaattgctttataaaaagtttcatgtaaaatacacattcttttatgttattataataatggctcaagtatattaatcgaggtgaggtattgagcttttacgaatttatgcaaaattttcttggtgatgacacaccattaggtgaattggttgattggattaatcaagatagcaatttccctagagaagtgaagagccatagtgaaatattgtcatattttcgaacaaatccatgtcctgaaagcatctcagtacctgtaattaaacgggcactatcagttttcaaccaattcacaaatgtacaatgatacatgaatacatggagtcacatcatctcatgttagcgctctgattgcagggcgctatttttaatgctatcgcttcatttagtatattgtgattgctattttctttcagttatagaaccacgtaccttttcttttaaatcattttatattttcccactaatatccgctgttaatcaatcctgacatccttgtatcactatgacaattaattgttaaatacatgaatttctacattttatgaaaaaatccatttttattacaattcaacactttatatgacaacttcattacagttacttttattgttgattgcttgcattgttttctaaaaaaaatttgttatcataattaacgttgaataaagaaaaaaattaacttgggagataaaaatggaatataaaaagatactaattcgtttattaattgcttttgcagtacttttctcagcagatttcacttatcaatccgtcgaacaaacgcatcaatcgcatgccgcagttaattattatagtaaaaaccaatgtacatggtgggcatttaaacgtcgcgcacaagtcggtaaacctgtttctaatagatggggcaatgctaaaaattggtattacaatgcacgtaaatcaaaatatgcgactggtcgtacaccaagaaaatttgctgtcatgcaatcaactgcaggatattatggacatgtcgcagttgttgaacaagtatataaaaacggtagtattaaagtttcagaatacaacttttatcgcccattaaaatacaatacacgtgtactaagcaaaaaggcagcacgtaactttaactatatttactaatcaaaaaacttctatcacgaacgcttcaatttcctgtatgcgtgtgatagaagtttttatttttgttcatattaatttatctaagcgctacgatggactgacttaaacttttctttaaaatcgctattcgcaatttactattgttgtctaatttcttgtaaaatacgttccgctgcttgtgtatttgcacggggttcttgcttcaatgcttcagctactttagcaatttcatcaccttttgctcctacaacgatagctaatgatttatattgtaaactcatatgaccttgttgaataccttcggaaacgagcgcacgacatgctgcaaagttttgcgctaaacctacggcagcaactacatgccctaattcttgcgctgactctacatttagcaattctaaagaagctttagcaattggtaatacttttgtaccaccgccaacgattgccaatgtcataggcacttcaattgtaccaatcaaacgttgacgatcttgatcgtaacgccatgtagcaataccacgatactgtccgtcacgacttgcgtatgcatgcgcacttgcttctgcaccacgcgtatcatttcctgttgctaaaacaacagcatgtatgccattcataacacctttattatgtgttgctgcacgatgaatatctacttgtgccaatacagaagcacgttccattcgtttggcaacctcttctccagttctctcgccccttgctaaatctttaacatcaatttcgccttgaactttaacaacggacgctgttgcatgattggataaaatactcattaaaatgtcgctttgcggaaattcattttttaaaaatgcagttatgtcctctaaaatcgtattaagcatattagcgcccatagcatctttcgtatcaacaaatacttttaaagatagtaactgttgctcaggaaatgtatcaatcgctatacgttggtaaccaccaccacgcgctttaatagaaggatatgcctcatccgcaattttatgaatttgcttttctaaagctttaatgtctgctgataatttttcagtatcgtcaacgccatcaaagacgatttgacctatcataatacgttcagaagataccgttttaaatccgccagtctgattcactagctttgcaccataactagctgcagcgacaactgaaggctcttccaccatcataggtacaacatatgccttatcgtccacaatgatattcggtaataatccaacgggtaatgcaccttgcgcgatgacattttcaattaaactattggctacttcttcatcgattaatggatgattcagtaaaatgtcgaattgttcttctgataaccattgcttatcaaccaattgttgtaacttttctttacgagataaatgtcgaaaattcttatctaaattttgcatggacgtactccttttacttcacataatttttaacatttcaatcactactatttttaccacaaaataacgtcattcgtcttaaaattcaattgaataattgtcgttttgactttaaaataaaacaaggtaaattaaaacgcttacaagaaacgacaaatcatttttaaatttagtatatttctttgtataaaattagcatattctgatatgatacaagtgttgcttttataaatttgaaaggatgtaaaaccttatgacaataggtatcgataaaataaacttttacgttccaaagtactatgtagacatggctaaattagcagaagcacgccaagtagatccaaacaaatttttaattggtattggtcaaactgaaatggctgttagtcctgtaaaccaagacatcgtttcaatgggcgctaatgctgctaaggacattataacagacgaagacaaaaagaaaattggtatggtaattgtggcaactgaatcagcagttgatgctgctaaagcagccgctgttcaaattcacaacttattaggtattcaaccttttgcacgttgctttgaaatgaaagaagcttgttatgctgcaacaccagcaattcaattagctaaagattatttagcaactagaccgaatgaaaaagtattagttattgctacagatacagcacgttatggattgaattcaggcggcgagccaacacaaggtgctggcgcagttgcgatggttattgcacataatccaagcattttggcattaaatgaagatgctgttgcttacactgaagacgtttatgatttctggcgtccaactggacataaatatccattagttgatggtgcattatctaaagatgcttatatccgctcattccaacaaagctggaatgaatacgcaaaacgtcaaggtaagtcgctagctgacttcgcatctctatgcttccatgttccatttacaaaaatgggtaaaaaggcattagagtcaatcattgataacgctgatgaaacaactcaagagcgtttacgttcaggatatgaagatgctgtagattataaccgttatgtcggtaatatttatactggatcattatatttaagcctaatatcattacttgaaaatcgtgatttacaagctggtgaaacaatcggtttattcagttatggctcaggttcagttggtgaattttatagtgcgacattagttgaaggctacaaagatcatttagatcaagctgcacataaagcattattaaataaccgtactgaagtatctgttgatgcatatgaaacattcttcaaacgttttgatgacgttgaatttgacgaagaacaagatgctgttcatgaagatcgtcatattttctacttatcaaatattgaaaataacgttcgtgaatatcacagaccagagtagtcggtgtatttaaaacacatataataaaacctaaaagcagcagtaagaccacttctcattgaaatcgtcttactgctgttttctatttataacattttgtattgaatggattagctaagcctgtttgacacattattgaaattttcctaagaacttaatgtcctaagctattctattttaaattgtcaaagtaccctagacgcattttatgttggaacgacttatttcatataaatatctatatgactaatattatcaaaatcaaacgttttttcttgtgagtcactcaatatgtcgcctaaatctattttatgtcttgctccatttttcatttctataattagttcccctgaattgtaattactatataggtgttctttttctaataaatattttctaattctaaaatctgtttcttttagagaaatctgtttattcttaacttctaataaactgtctggattcactttagtttgatgaccgttaacaaacaagttcattctataagataagttagttacttttgatataggatcatacttaactactgtaccacgatatactttagattgttggttttcatataatgttccccatatattaactttgtcttgatttttaaactgtttcaaataatcagtgttgtagagcactgtccgtacattgtaggtgtcaactttcgcgtctatataattttccccaactcctgttacttctttattcgtataaacttcaaatttttgtgcataatgctcttttaaactgtcattactattttctgtaatcaatccagttgtttttgcttttacttctgctattccaatagatcccgttactgcaatcaaaaatgccaaagttgtcaacaaaaaccatagtttagctttcattttcagatcatccttttctcatttaagattaaattcatcaaatgctttgtgcgcaatttaatgttattaccgaatgatctatatatcaatatttctagatgttaattttctaaaattatcattaatttattttgattagtttttaaaataattcaacgtatttaacaatgcatagatttatttttctaacatatttatacgttacggctttgtactgtgtttaggtatataaagctttgacatatcgatattctccagctctaacagcttaattttattattaatcgttccaccaaaccctgttaagctacccgttttaccgacaacacgatgacatggcacgataatagataatggattacttccgactgcacctccaaccgcttgggctgacatttttggcttatcaagcaccttgcctacttttttggcaatagcaccatacgttgttagagtcccataaggaacctgtcttaattcattccaaacacactgttgaaaatgactacctgttggctttaaaggtattgtgatttcaggattgtcacctttaaaatacgcgtctaaccactgtgtcgcctctttaaatatcgctaaagacgtattttcttccctagtaccatcaccttgttgattttcaaacaaaacagcggtcagacttaccccatcactcaaaagttccaatcgtcctacaggcgaatcatagtaattcttatactccataaaaatgccccctttttctaatcatacgccttaattgttaaattagaaaatattcatgttcacattttttaaaaataaataagtcgtcaattacgtatataaacacgtaataccagctatcactttgctgcaatatacagttacatatcttactacacgtgctaacctcttactttgtaaaccaaatcttaaattaaaatattgaaaatgcaatgaatccttaatattttattaaacctataattacttattaaaaataacacacaatattcataaagttttaaaaatattctgttttatcacctactattagtggaaaagtacaattgcaattgtatatagtttgcataacgcttcaaaagtaatttcttttttgtttagttcaaaaaaatttagaggtgatgttatatgaataacggttttttcaatagcgactttgattcaatttttcgaagaatgatgcaagatatgcaaggttcaaatcaagtcggaaacaaaaagtactatattaatggtaaagaagtttcacctgaagaactagcgcaactcacacaacaaggtggcaatcactctgctgaacaaagtgcgcaagcttttcaacaagcagcacaaagacaacaagggcaacaaggtggcaacggcaattatttagaacaaattggtcgtaaccttacgcaagaagcacgtgacggtttattagatccagtcattggtcgtgataaagaaattcaagaaactgctgaagttttaagtagacgaactaaaaacaatcctatattagttggagaagctggtgttggtaaaactgcgattgttgaaggtttagcacaggcaatcgttgaaggaaatgtaccagcagcaatcaaagacaaagaaattatttctgtagacatttcatcattagaagctggaacgcaatatcgtggtgcttttgaagaaaatattcaaaaattaatcgaaggtgttaaatcttcacaaaatgccgtactattctttgatgaaatccatcaaattatcggttcaggtgccacaggaagtgattcaggtagcaaagggttatctgatattttgaaacctgcattaagtcgtggtgagatttctattattggtgcaacaacacaagatgaatatcgaaacaatattcttaaagatgctgcattaacgcgcagatttaatgaagtgcttgttaatgaaccaagcgctaaagatactgttgaaattttaaaaggtattcgcgaaaaattcgaagaacaccatcaagtaaaattaccagatgacgtattaaaagcatgtgttgacttatcaattcaatatattccacaacgattattaccagataaagcaatcgatgtgttagatattacagcagcacatttatctgcgcaaagtccagctgtcgataaagttgaaactgaaaaacgaatttctgaattagaaaatgataaacgtaaagcagtaagtgctgaagaatataaaaaagctgacgacattcaaaatgaaatcaaatcattacaagataaattagaaaatagtaatggtgaacatactgctgttgctacagttcatgatatttcagatactattcaacgattaactggtattccagtttctcaaatggatgataacgatattgaacgtttaaaaaatatttctaatcgtttaagaagtaaaatcataggtcaagatcaagctgtagaaatggtttcacgtgcaattcgccgtaatcgcgctgggtttgatgacggcaaccgtccaattggtagtttcctatttgtcggccctactggtgttggtaaaacagagcttgctaaacaattagcaattgatctatttggtaataaagatgcacttattcgacttgatatgagtgaatatagtgacacaacagctgtttcaaaaatgattggtacaactgctggttatgtcggttatgacgacaattcaaatacgttaactgaaaaagtacgccgtaatccatattcagtcattctatttgatgaaatcgaaaaagcaaatccacaaattttgacattgttattacaagtaatggatgatggtaatttgactgatggtcaaggtaatgttatcaactttaaaaatacaattattatttgtacatcaaatgctggctttggcaatggcaatgacactgaagaaaaagatattatgcatgaaatgaaaaaattcttccgccctgaattccttaaccgcttcaacggcatcgttgaattcttacatttagataaagatgcattacaagatatcgtcaacttattattagacgatgtacaagttacattagataaaaaaggtattacgatggacgtttctcaagatgcgaaagattggttaattgaagaaggctatgatgaagaattaggtgcgcgtccattaagacgtattgttgaacagcaagtacgtgacaaaattacagattattatctagatcatacagacgttaaacatgtggatatagatgttgaggataacgaattagtcgtaaaaggtacataacgacactttaacatatcaaaaatgagcatcaggtcgcccttgcctgtgctcatttttttaattatttccctggaaaatgattcgctgtgtgctgttctgttccacaacaatcacgattaatgtcacatgtaccacattttccttgttttgaacgcttgaaaaattttactagtgtatataaggcatatccgaaaattgctaaaaaaattaaaatgttaataatgactgacactttaaccactccttaaacaaataaatgtccgacttgataaaaaatgaatgttaagacatatgcagtgactagaggataggcaactgcaagtgccgtccatttccatgaataagtctctttacggattgctgccactgtagaaacacaaggaatatacaatagtataaatatcataaatgcatacgcagatagcggtgtgaattgattttgaatcacattaacaaggcctgcatcacctgatgaatagataatcgccatcgaacttacgataacttcttttgctaaaaatcctggcactaacgtagcacctgcttgccatgttccaaatccgagcggttccactaacataccaaagaagctaccaaccatatgtaaaaaactttgattgatattcacattgataccatgtggccctacataacttaatagccaaatgactactgagccgccaaaaataaatgtacctgctttacgaacaaagcccttagccttttcccaagtactacgccacaacgttttaatggaaggaacacggtatgttggcaattccacaataaagattgcattatcattttttaaaatcgtcttagtaagtactgtactgactaaaaatgccataataatacctaaaacatacaggcttaatactactaaagattgattctctttgaaaaagatacctacgaacaacgcatacactggcagtctagcagagcatgacatgaatggtgcaattaatatcgttgttaaacgctctttttcattttcaatactgcgcgcagccataatactcggtacgttacaaccaaatccgataatcatcggtataaaagacttcccgcttaaaccgaacgattccataatacgatccattaaaaccgcaatacgtgccatataacccgaatcttctaataaagatataaagaaaaagagcacaacaatttgtggtacaaagactaatactgatcctacaccagcaataatgccatctgtaattaaatcttgtaaaaatggtataacaccaagataattcataatcgtcttcacactatcggtaaatgtaccacctataaatgcatcgagttgatccgacaaaggtgtgccaatccatgtaaatgtagtttgaaagatcaaccacataatcgctagaaaaataggcatccctatatatttatgtgttaatatcttgtctattctagagctgaaatattgcttatcttcatctggatacgttaccacgtcttgcaataacgtctcaatataatgattgcgtatacgctccatctctcgacgaacagatacagcctgtacttgtttatcaacttgatcacgtaaactcgacaatttatttacaacctctgaattaagttcgtttgcaatttgcatgttatttaataagaattgaatcgcaataaatctagcttgatacttatcatgagatgtctctgtcattattatttgacacatatttttaattgtctcttcaatcttctcaccataattgattttaaaatgcggttgatacccttcccctagatgctttatttcgccaagtaaatgtttagttcctttgcctgtacgtgccacaactggaaaaataggtgtttttaactttttcatcaatttatgataatcgatttttatcccgcgctttgtagctacatcaatcatatttaatccgatgtatattggttgattaagttctaacaattgtactgttaattgcatatttctttttagttgactcgcatcaacaatgttaatgattcctgaaaatgaatcgtttaataaatagtctgtcactacagtttcatctttagaaatcggcgataaatcatatgtacctggtaaatcaattaattgtcctacattttcttttagcttccctacttttttctctaccgttacgccactccagttgcctatatattcatacgaaccagttaaagcgttaaacaaagatgttttaccaacattaggatttcctaaaatacaataattttccattcgtccggctcctattcttctaatgcaatagaacaagcatcgcaatgcctaatacttaactgttgtccgtttacttcaataatacatggccctttaaataaacatttttgtttaatcgttatgatagcgtcatctgttaacccaaaggcacttagacgatacaacatattctcattagcaatatccattcgctttattttataagccttattcatttcaccatttttaatgtttaacatactatttcgctctcctattagaaataataatcattatcacttaaaaatcataacccttaaaattgtagctcgcaatactttatttaaataattttcatttttcatgtaaaatttgtgacattgcaaaaatgttttgtataatcacttccatgcaaaaaacctccgcttcaaatgtcattgatagacatttaaagcggaggcatgtacatgttattttatgatttatttcgtagatttttttctaacaattgattgagcttttcaatatttttattcaactgttctatattcgttgcttgttgttttgaatttagttgatgcttgttttgataatctattaaagcatcatataagaacaatgaacttgctgattgctgtttcacttcttggtacaatgccatcgttttatcatctagtactattgaatgtgcatcatcttgcccatgtgcatcttgatgtttcgatacatttgttgcaccttgtggatatactttaaaggttgtgtcgtatgtttccttactatctttagcttcagattcctgtgattcaaccgttttatatttttcaagtgcatgtccttcaatatcaactcgtggaataatgcgattcaaccatgctggtaaataccacgaaccttttccaaacaatttcgttaatgcaggaattaacatcattctgactacgaaggcatcaaagagtacaccaaacgctaatgccatacccattgatttaatcatgacatcttcttggaatacaaacgcaaagaagacactaaacataattaatgcagctgctacaataacaggaccgctttctttcaatcctactttgatagaataatcattatcccctgttttactatattcttcatgaattcgcgacataaggaagacttcataatccatcgctaatccaaataagatacctatagtaataaccggtaaaaatgctagcattggtcctgtcgtttcaataccaaacagacctttcataaaaccatcttgcattactaatgttgtaaatcctaatgttgccattaatgacaagacgaatcctaaaactgcttttaatggtattagaattgaacggaagacaatcattaataagaaaaatgctaatacaacaatgactgaggcaaataaaggtgtcgcctcatttaactttttagacatatcaatattaatgacactttgtcccgaaatctccgttttgaacccatatttatcttgtgcatctttatgataatctcgtaaatcatgcactaaatcatttgtactctctgcattaggcccttgcttaggtatcacgaccatcaaagcgtaatcattatctttactcatttgtggcggcgtaacgatatctacatttttcttatctttaatatctttatatacagactgtaaatcttgttgtaatccttgtggatcatcctttttatctttcacatttatcaacatcggaatttggccattaaatccttcaccaaatttatccgagattatatcgtaagcttttttctgtgtagaatctgctggtttaacaccgtcatctggaataccaagtcgcatatgactaactggtattgcagctgctactaatatgattaaacctagtaatactgccgcaagtgcatttcctgtaataaatttagaccaaggcgtatcaatatcttttttaaaattagactgcaatttgttcactttaatgcgtttatggaaaatactaattaacgcaggtaataaagtcagtgcactgaatacagcaaatataacactaattgccgaagcaaaccccatcactgctaagaaatctatgccaactagcgataaaccgcatacggcaatcacaactgtcacaccagcgaagatgactgcgctacctgctgttcctattgcaagaccaatgcctttaatgtaatctgtttcagttttcataacttgtcgatatctgaataaaataaataatgcataatcgataccaactgctagtccaatcattacggctaatgtcagtgtgacatttggtatatcgaatgcataagttaacaaactgataatgccaaccccagatgctagaccaatcaatgcacttataattggtaatcctgcagcaatgactgaaccaaatgtaatcaataacactacaaatgcaacaatgataccaactagttcagaattaccgcctacttctgtagatgtcattcctgtaccagttaactctgtttgtacattatgattgtcacgtaagtctttcaaatgacttttaacattatctctagagccatcttttaaagatgtttgactaacgtcatatgtgatatctgcaaatgcagttgttttatctttactaatttgcttattttcatatggatctgatattttatcaatgtgcttgtcatctttttttatatcctctaatgttttcttaatgtcttctgtaatgttcggttgcacaataccatcatctttaatcgtcttaaagacaacacgtatttgtgccttttcactatcttgattaaaatgtttttcaatctttttattcgtatctaacgactctaatcctgtcattttaatatcattgtcaaatttcggtgcatttgtagcaagtggtatcaatattgcagctacaatcactatccatgcaatgaccgcggaccatttatgttttgcgatgaatgtccccatcttatataaaaattttgccaaagtatattgcctccttttaaaatcaacgttatagtttaaatatacagtgtagattattgttcgattatagtatctatccccgacctcttaaagaatcaattggaaaattttgtatattaaactacacacaaaggagaaatgtagatgaaagagactgatttacgagttataaagacaaaaaaagcattgtcgagtagcttgctacaattgttagaacagcaattattccaaacgattactgtcaatcaaatttgcgacaatgcactcgtacaccgcacaacattttataaacatttttatgataaatatgatcttctagagtatttgttcaatcaattgactaaagactactttgctagagatatcagtgaccgtcttaatcatccattccaaacgatgagtgatacgattaataataaagaggatttgagagaaatcgcagaattccaagaagaagacgctgaatttaataaagtattaaaaaatgtctgcattaaaattatgcataacgatatcaaaaataatagagaccgtatcgatattgacagcgacatcccagataatctcatattttatatttatgactcgttgattgaaggttttatacattggataaaagatgaaaaaattgactggcctggcgaagatattgataacattttccatagattaatcaatattaagattaaatagtagatgagaaactcatgagcgttaccaacattcataataaaaacgatagtgtacacgttaatgaattcgtgtactactatcgttttttatttttatcgtgcttatcgttattaaaataactgatacacaacacataaactatgaagaaaaaaataaatccgctatctaaatgactttgactcagttgtttatatgaccaaattgctaatacaattcccattattattgaaataacgtatctcacattcttacacctataatccttttctaaaaatatggttgctattacttaatttttaaagttataaataaaaagagccaaccgcaatggatggcccttgttcattatgaagcattagaacatttctgaaacaaccttttgttctaagaagtgtaataagtagtctgggctacctgttttagcgtccgtacctgacattttgaaaccaccaaatggatggtatccaacaactgctgaagtacaacctctgttaaggtataaattacctacatcaaattcgtttaccgctttaatccaatgctcgcgattatttgtaatcactgcaccagttaaaccgtaatctgtatcatttgcaacctcaatggcttcatcaaaatcgttaactttcacaaagccaacaactggaccaaaaatttcttcttgcatgattctatctttagatttaagtcctgaaatgattgttggttctacaaagtaaccttttgaatcatcagtgccgccaccttgttctaatttaccttcttctttaccaatctcaatataatttttaatcttatcaaattgttttttattaataactgggcccatatacgtattgtctacagtattgcccaacgttaattcttttgttaatttgattgatttctctaatacttcgtcataaacgtctttatgcacaattgcacgtgaacatgcagaacatttttgaccagagaaaccaaacgctgacgttacaatagcttctgccgccatatctgtatcaatattttcatcaactacaatggcatctttaccacccatttcagcgataacacgtttcaagaagttttgaccttcttgaactacggcactacgttcataaattctagtacctgtcgcacgtgatcctgtaaatgtaacgaaatgcgtatctttatgatcaactaagtaatcaccaatttctttcggatcaccaggaacaaagttaactacgccttttggtaatcctgcttcttctaaaatttccattaatttataagcgatataaggtgtatcctcagcaggtttcaataacactgtattacctgccacaactggtgctaaagttgtaccagccataatcgcaaacgggaagttccacggcggaattgtaacacctgtaccaattgatttatagaaatatttattgtgttcaccttcacgatcaagtactggcttgccttgagccaagtccatcattgaacgtgcatagtattcaataaaatcaataccttcagctgcatcaccaactgcttcatcccatggcttacctgcttcataaaccataattgctgcaatttccgcttttcgacgacgaataattgccgaaacacgtaacataagctctgcacgatcatttgctgaccatgttttccaagatttataagcttcgtttgctgctttaaacgcatcttcaacatcttgttttgttgcctttgatgcatttgcaatcacttgtgatgtgtctgcaggattgattgatttaattttgtcatctttgaaaatcttctctccattaatcactaatggtatgtcttgacctaattctttttccacgtctttcaatgctttcttaaacatatccacattttcttggactgaaaaatcgtaaccaggttcatttttaaattctactaccatgtacacttaccccctataaattttgaaagtggtttaaccctttgatttaatgatataacatcatttaaactcattttactatgattaaggttagttttgcaatcgctttcatttttatgctttatcacttattctcaagcattttgaaattgattggttactttttaaaatttatatgtgtcgcaactgctactttatcgtttcgtcatttaatgtttcggatggtaggtcattatcaattttacgaacgactttacaagggtttccaaccgctaagctgtgtggcggaatatctttagtgacaacactaccagcaccaatcacactaccttctccaatcgtcacccctggtagcacggctacatgaccgccaaaccaagtattactgccaatatgaatgggtccggctttttcaaaaccttcatttctatgatgaaaattaagtggatgtgtcgctgtgtagaatccacaattaggtcctataaaaacattatcgccaattgtaatctgtccaccatccataaaataacaattggtgtttacatagacattttttcctagtttaacgttccaaccataatctgtatcaaaaggaatcgaaatacttacattgtctgttgttgtttgaaataattgatcaattaattcctttcttttatttgtagcactcggtattgtatgatttaattcaaagcaaatatctttcgctcgtgcacgttcattgattaagtcttgatcaaagtttgcatcgtaccatttttctgctaacattttttctttttcagtcattacacctttcaactcctaataacttatttacttgtttaaaagttaatcaaataaaccttcgcctatgcaactaatacgctataacattataaaatcatgaccttatcccccttatctatacaattctcgcatcaaatactgctaaagtagtagataaattcaatactacagacgcattcattttttaatctattaacgtacaatgtgagtaagagaaatataaaggagtatgatagcgatgagaatattaattacaggcacagttgctatcttaatcattctaggtttggtcaaaacgatacaagattacgaaatgacaaacgacacgagtcgtcagttgtcagacaacaaagatgatgataaagtcatccatcttaataattttaaaaatttacatgcgaaagaatttaacccatctgatttcttttaagtcacctaagaattgcaaatccagaagtcatttaagttttacctttcattcatacatcctttaatattaattacgacttcttttatatagatgctaagtagagagattgttgtgcaatgtttgcacggcaatctctctttttctttttaaaattggtaaaagtaaaacgcaacgattgacttatatacctatagggggtacattagacgtgtaacaatgaatcacagggaggcaataatgtggctaatacgaaaaaaacaacattagatatcactggtatgacttgtgccgcatgttcaaatcgtatcgaaaagaaactgaataaacttgatgacgttaatgcccaagtgaatttaactacagagaaagcgactgttgagtataaccctgatcaacatgatgtccaaaaatttattaatacgattcaacatttaggttacggtgtcgctgtagaaactgtcgaattagacattacaggtatgacttgtgctgcatgctcaagccgtattgaaaaagtgttaaataaaatggacggcgttcaaaatgcaacggtcaatttaacaacagagcaagctaaagttgactattatcctgaagaaacagatgctgataaacttgtcactcgcattcaaaaattaggttatgacgcgtctattaaagataacaataaagatcaaacgtcacgcaaagctgaagcgctacaacataaattgattaagcttatcatatcagcagtattatctttaccactattaatgttaatgtttgtgcatcttttcaatatgcatataccagcactatttacgaatccatggttccaatttattttagctacacctgtacaatttattattggatggcaattttatgtaggtgcttataaaaacttaagaaatggtggcgccaatatggatgtacttgttgctgttggtacaagtgcagcatatttttacagtatttatgaaatggttcgttggctaaatggctcaacaacgcaaccgcatttatactttgaaacaagcgccgtactaattaccttaatcttattcggtaagtatttagaagctagagcgaagtctcaaacaaccaatgcgcttggcgaattattaagtttacaagctaaagaagcacgtattttaaaagatggtaatgaagtgatgattcctctaaatgaagtacatgttggagatacacttatcgttaaaccaggtgaaaagatacctgttgatggcaaaattattaaaggtatgactgccatcgacgaatctatgttaacaggtgaatctatccctgttgagaagaatgttgatgatactgtaattggttcaacgatgaacaaaaacggtactattactatgacagcaacaaaagttggcggggacactgcgttggcaaatattattaaagttgtcgaagaagctcaaagttctaaagcgccgattcaacgattggcagatattatttctggttatttcgttcctatcgttgttggtatcgcactattaacatttatcgtgtggattactttagttacaccaggtacatttgaacctgcacttgttgcgagtatttccgttcttgtcattgcttgtccatgcgcattaggacttgctacaccaacttctattatggtaggtactggtcgcgctgctgaaaatggcattttatttaaaggtggcgagtttgttgaacgcacacatcaaattgataccatcgttttagataagacgggtaccattacaaatggtcatccagtcgtgacagattatcatggtgacaatcaaacgctacaactgcttgctactgctgaaaaagattctgaacacccattggcagaagccattgtcaattatgcaaaagaaaagcaattaacattaactgagacgacaacatttaaagcagtacctggacatggtattgaagcaacgattgatcatcaccatatattggttggtaaccgtaaattaatggctgacaatgatattagcttgcctaagcatatttctgatgatttaacatattatgaacgagatggtaaaactgctatgctcattgctgttaattattcattaactggtatcatcgcagtggcagatactgtaaaagatcatgccaaagatgcaataaaacaattgcatgatatgggcattgaagttgccatgttaactggcgataataaaaacactgctcaagccattgcaaaacaagtaggcatagatactgttattgcagatattttaccagaagaaaaagctgcacaaattgcgaaactacagcaacaaggtaagaaggttgcgatggttggtgacggtgtaaatgatgcacctgcattagttaaagctgatatcggtatcgccattggtacaggtacagaagttgccattgaagcagctgatattactattcttggtggcgacttgatgcttattcctaaagccatttatgcaagtaaagcaaccattcgtaatattcgtcaaaatctattttgggcattcggctataatattgccggtatccctatagctgcattgggcttacttgcgccatgggttgctggtgctgcaatggcactaagttcagtaagtgttgtcacaaacgcacttagattgaaaaagatgcgattagaaccacgccgtaaagatgcctagattccttaataatgaaggattcgttggtgattctgagataggctagtgattggctctataatgtcgcggtttacagttggatcttcgctccaactgcatatatagttacacttttcgcttagcgaattagtgtatcttacctaatagctccgcctattaggttccaacattattataaataataagtacactacggtttacagttggatcttcgctccaactgcataagagccactaattattataaataataagtacactacggtttacagttggtccttcgctccaactgcataagagccactaattattataaataataagtacactacggtttacagttggatcttcgctccaactgcataagagccactaattattataaataataagtggctctaaaaggaggtgaatgctatgtcacaagaaattttaaatgttgaaggtatgagctgtggtcactgcaaaagtgctgttgaatctgcattaaataatattgacggtgtcacttcagctgacgttaaccttgaaaatggtcaagtaagtgttcaatatgatgacagtaaagttgctgtatctcaaatgaaagacgcaattgaagatcaaggttacgatgtcgtttaattaggcaatattcaacgtcatcaacaccaaattaaaaaatcgaactgatgagaatcccaacaatccaaattatctcatcagttcgatttttaatttactcgtaacctagtatctccagtctgcaatacatctaatgttgcatctaatgcatcgacaattagatttttaactgcagcttcagtataaaacgcaatatgtggtgttaatatgacatcttccctgtcaatcaacgattctaacaatggatcgttcagtgttttgcccctttgatcacttgggaaaagtttgcgttcaaattcatacgtatcaagtgctgcacctttaatcacaccattgtctaatgcgtctaataacgccttagtatctactaaagaacctctcgcacaattgacaaatactgcgccctttttaaaatgtttaaataattcagcattaaatagataatgattatatttcgttgcaggtacatgtaatgtcacgatatcagcaccttcaaccgcttcctcaatcgtatctttgtaatcgacatacgttgcaattttagcattaggaaacgggtcgtatgcgaccacatcactttgataaccattggcaaatatatcggctactacacagccaattcgacctgtaccaataacagctacttttaaatctttaatggatttcgataaaatagtaggttcccatctaaaatcatgctcccgcactttcgtttgaatttgattaaaatgacgaaccacattaatagcctggttcacagcaaactccgcaattgaattcggagagtatgacggcacatttgacacaatcaagttatacttgtttgctaactccaaatcatatgtatcaaatccagcactacgttgtgcgatttgtttaataccaagttcatttaatcgtttataaacatgctctgataatggtatttgttgtgatagcgataagccatcataaccagcgacaccttcaacattgtcatcagttaatgcttctttagtaatatctacctcaacatgatgtttctctgcccacgccttgatataaggcatatcttcatcacgtacactcatgattttaatttttgtcattttaacatcacccttaactttattattcatataaatatgctagttctgttaatcttattgcagcttcgtctaatttctggtcatctaacgccaatgaaattctcacataacgattaccattctctccaaatggtttccctggagcaacaagtattgacttctcttgcactaaaaattgctcaaattgctcgctgtcataaccaggcggtgtttccaaccatacatatatgccacctttagcatgaacaaatggcaaatcagcttttgcaagcatggcttcgaatcggtcacgacgtgttttaaatacattgctttgttcttctaaaaaatcatcataatgattcaaagcatatattgcggcatcttgtaatgcaccaaacatcccagcatttgtgtgcgtttggtactttttcaaagcttgaatcatatctttattaccaactgcaaaaccgactctaaaacctgacatgttataacctttagacaaggaataaatttcaatcgcaacatctttcccattttccgaagcaagtatactaggatttttagcgtcgaaaccgaaagcaccataagcaaaatcatgcacgattttagtgtctgtatctttaaatttagctatcgcttcatcaaaaacttctttcgtagctgtcgatccagttggattatttggatacgttaaataaatgagttttgttttatctattatttgtgaatcaactttggaccaatctggcaaataatgtggcggttctaaattaagcgggacaggcttgccatcagctaaaagtacacctgctaaataatccgtgtatcctggatcaggtagtaatacatagtctcctggattgataacacatgttggtactgccactaatccattttttgtaccatataaaatgcatacttcatcttctttatctagcgtcacattatattgtctttgataaaaatctacaatagcttgcttgaacgcttctttaccatgaaaagcaccatatttttgattttcaggaatagttagtgctttttgaaaatgatcaataataccttgtggcgtgggcccatcagggatcccaactgccatattaattaatggcaatggtccatgttcgattttacgtcccatcgttttcccgaaataactatcagggatatttgctaatttgttagagatcatcaaattcctcctctatcattaaacgtagcctgggtgactatcataaacctaacaacttgtatcactctcatttagatggttacaatgacattgccattcaccgttatgttcaacagaacttatgacacacgttgtattcaatgaatttattttcattttaggtaggtacaatattattgtcaatattaagaattttcagattaatatacactcaatcgttaggatttaactgccatgcatatccgcatgcacaaccagttagatatgcttatataaagtataacgcccatcaaggtacgtattcaaacgtgaaccttaacaggcgcctattcattgttaaataaaacttctttagaacatacttatttcactatgccttttacgttccccttatacttttctcacatctttctcttagactactcccttacacaccctgctcaatatctttaatcatttcatctacagttattttcgcactcgttaagacaataggaacgcctgcacctggatgcgtacttgcacctgcaaaatataaatctttataatctcgcgatacattttgtggacgataataattactttgcgctaaagttggcattaaaccgaatgccgaaccaaatttcgcatgatacgtttgctcaaaatcatttggcgtaaagattgtttctgaaacaatatgcgattttatatcttcaaatacttcaatcgttgctaatttacgataaataatttcctttatttgttgcgtcaaagcttcatctgaccaatcgattccgctacctgttttaagttccggcgtcggcattagcacataaataccagttttgccttctggcgcaagtgatttatcagcgaccgctggtacatacacataaatagaaggatcatatgataaacgtccctcaaatatttcttcaatattgcctctaaagtcatctgaaaaaataacattatgaagtctcacttgatctgtcacatcaatatctataccgatatacattaaaaatgctgaacaagagtaatctaagtctgcaattttatgtggtggatactttttaataggtgcaaaatctggcattaatgattccgcaacactagggaaatcagccgtacataaaattttatcaaattttcttatgtcaccattcacttttatcgcatcggcccgtttgaatttaggatcaataataatttgctcaatttcagcatttagttcaatattaacgcctaagtctttatttaattgcgctagcccttgagccatgccatacataccgcctttaataaaatgcacaccaaacatcatttcaatcataggaataattgaatatagtgacgggcctcgttttggatcaattcctatgtataacgtttgaaacgctaaaagcttttgtatcttttcgttatcaatataatgttcaattagctgatctgcatgatttaacgtttttaacttagcaccttgcacaagtgacgtcatattataaaagtcactcggtttgcgatacgttctttctaagaaatagcgacgtgcaatttcatattttttataaacatccgttaaaaaggacataaaaccatgcgttgaaccaggttctatactttctagcatttgctgtaattcagctaaatctgtaggcaccgttatacgatcatcgtggtcaaaatacacatcgtaaatataacgtaattgtctcaattcaatataatcttcataatttttaccacacgctgtaaaaacatctttataaacatctggcatcatgacaattgtgggacccatatcaaatgtaaagccgtctttctttaattgattcatacgcccgcctacattattatttttttcaaatatcgtcacttcatgaccttgagaagcaatacgggctgccgctgctaatcctgtgacacctgcaccaattactgcaatcttcattattcaaccacctatattctatgatatttactatttatttcatgaaacaactttgcctttttccgcttatccacaaaaacacgttcatgtaatgtatagttagcctgtctcacttcgtccagtatttcaatatatatacgtgctgctaattctatgattggttgtgcttcaatactaaatactttgatttgatccataacatcttgaaaatctttttctgcgatagctgcataatattcccataagtcaatataatgattattaacaccattttggtacacttcagcaatatcaacttcatattgctttaatcgttgcttactaaaatatatccgttcattgtcaaaatcttcaccgacatctcttaatatattaatcaattgcaacgattcaccaagtcttcttgcgacatcgtatgtctgatgtgtttcatgatcacttaaaatcggcgtcaatacttcacctactgtaccagcaacaccataacaatatccgaataattcagcgtccgtttcaaacattgtaaaatgttgatctttatatacagtatcaatgagattatagaaagattgaaaggcgatatttttatgttgtgcaacatgctgaagtgctatcatgattctacgatcactttgaaagtgatgatgttcatatgggtatttttcaatagattgtatatcttcttttatttgatttaaaaattgaatatcgccataaacatctatactgtcatcaattttacgacacacagcataaattgcccaaaccgcttttctttgatcttctggtaacaagtcaaaagcgtaagaaaagctttttgaatgtttcttcatgattttatgacaatatttaaaattcatatccatcattgtcatactagtcctcctatattgaaatgccattaccttgatttattgttctttagatatagaatattgacgacctttccattcaactacaccataacgatgcgtttgtttccaagattggatgaaaattttagtaaaaaacataaataacaatggatgacataccattaataaattagaaaattggccgacccttcgatgcagataaataaattgtgtagtgtagctcaagtaaagtgctaccatttttcttacagacatttggcgatattttaaactaagacatagccctaaaatactcgctatagaaccgaacaaccacaacacaattgctgtcatgatcttaggctttgtgccacctgccccagttgacaaatgctttgtccatccttcttgtaatgactgaaatccttcttgatacatgcgaaatgcaacaaatggaaatccttcataaactgttacgggcaatgattgtgaagtatatgcacttcctaaagcaaatccttcaataatatgacggttcgcacttttatgacctccagttgcataataatcttctttatttgttaatgtcaccggtccaaatgcatgctggttagtccgaccgtcgtctaaggtagaaaatacattcataccaacgactgtcattaaattaaatatcgctgaaaacccttcgtagaaacgctttgttatatgataaggctgtacgcttaacaatcctttttcaccttgtaattgatactgattaatcaacgtttcaacagcatctttccttaagaaagttacatcagcatctacaaaggcaatacgattcgtacatacatgcgtcacaccttgataacaagcatgtgatttcccataccatttgccgtcagtatcatcaacaacatctactacagtcgcaccatatgaacgtgctacacgtgctgtttcatctgtcgatccgtcattcataacaatgacatctactggaacttgctgttgtattatcgaatgtagtaaatgacctattcttttttcttcgtttctagccggaataataattgttaatgctttatgattgaagttcagcgttttcgcctttagctgatgtctacgattaaatatcaatgcaccacacgccatagacatggtcactattactgttaatattcgtgataaccatttcatagatatcacttcctattcttcgcttctcgcacgtttattttgtctgcgacttgttgcccacttaatgtaaccattggcatgccaccaccaggatttactgatccacctacaaagtacaagttttcaaaatactgactttctttaggaaatttaaaccctttgtttttctttttatctgctacaacaccatatattgcaccacgattagaacgataatttttttcaatatcctccggtgtccaaacatcttcataaataatgtgttttcttaaatcagtaagtcccattttttctaatttatccaaaattttatccctaaacttcgcataatcttcagtggtaaaaggctgatcttgaatatatggaatatgtggtaagactttgatattttcataacctactggcgcttgtgtgtgatcagttttattcgtatttactagataaatggtcggatcatctggcaataccttttcatgaaaaacttgttgataattgagataagcattttccgtaaaaaagaaattatgatgtgctaattgcgggtattggcaagcaacacctaaatgcatcacatatcctgagcttgctggctcaaattcccgctctaatttgtttaatcgttgagtatcaaggtgaagtaaatatttataagtaggtatgacttccatatttgaaataatataatctgcctttacaaactcacctgtatctaatctgacacccgtcacacgtctttgatatgttttaatattgtccacacgtgcacctgtatgaattgtgacaccttcttcacgcgctagcttttccaaggcattggctaaatgatggattccaccttctacataccaaaggccttgctcttgttgcatatggaataacatagataatacagctggcgcatcgtatgatgaagaacctacatatttgataaaatagcctaacatttgtcgcaagtatggattcgagatacgcttgtctatggcctgttgcatagtatgtacataatcataattaataagagcatttaatggcccatgaaatttaataatttgagatagtgtatctaaaccatagttaaaataccctttttcagtaatacgatcgattcgtcttgtataattcaaataattttgcagttcctctatatcctgtttcgacaatatcgcattatgctgacctgtttctttaataccttcatacaaatcgatagtcgtgccatctggaaaaaagctacgccattgatgtggtaaacgcttgattgtaacgtagtctgacatttgcttcttgctatattcgaataatttttcaaaaatataaggcatcgttaaaatagatggacctaaatcaaagccaaagccatctgattcatgacgattcactttgcctcctatatgattattttgttcatataatgagaccgaatagccactttgtgccattcgaattgctgcagaaatcccacctaagccaccaccaataacgatgatatgtttagtcatgacgttcacctcttcgctttaatatgcgtagtaactgcgttaatctcggtcgattatagcgttgcacaataatgattggaacattagctatcattgcatagaaaatatttatatactttactaaacgagggcctttattgaatatgatgactggaagtatcgatatccaatgaatcaactctgccctctttgtctctataatcattttttcaatttcatcagtattgattgtcattaaatgacgctgatcatatatattttgattaagctgatgaccatctaaaatcttatgtttccattttcttacgtaaaaccatttgttccaaaattttccatgcttctcaaagttaaatgatttaaatattatgtacttctgacgaaaatacttatcaggaattcttgtacctaaatttgctatatttagttgaacaattaaccaatacatactacaaaaaaatgctgttttaatatattttttcatggttttcatctaaattgaatcactctcaatcatactgacatagtataaattatcactttattacttagttccctaaagatcagtgaataaaccgctctcatttatatttatataaaacaaaaacgccaatactctcatgttagagaatattgacgtcatttgatttacatttgattaatgaatgaaattatatgaacctgcttggtttgctgaaattgtacgagacgtaaccacaccagcaccatgtccatagttcatttctgaaacacgaacagaaccgttgctgttaacgccttcaacgtaagcaacatgaccgtaatagccttgtgttgtttgcatgatagcaccaacttttggtgtattgttcactgtatagccagatgatgcagctgcgttagcccaattacttgcgttaccccatgttgaaccaattttcccaccaacacgatcaaatacataataagtacattgtcctgaagtatataagttacttcctgatgcataaccattagaaattgaacgaccatttgaagatggcgctgcagttgtagtcacatgaacattattacttgttgtgctataacttgcacctgaaccaccagtataatagttatttgttgctgtttgactattgtttgtatagttattgtattgatatgaatgattatagtagttattgtaagatgcattgttataactataagtattgtagttgttgtagtagtatgtgttgttttgcgttaattgacttggattccaatttcctgtccaagtgtaatgataattaccttgtgcatcaattgtatacgtatagctgtatgattgagcgtcattagaattatatccattgttattttgttctgcggcttgtgcatcatgtcctgcaaatgcgatagtggcaagtcctgctgtagcgattgtagctgtaacgatttttttcataattaaatatcctcccaataatcaaaacactctatacatatagtcattagcgactcaattattttaaattttatattttttatttttttagtatgcaaacaattataacttttatagttttgcgacaaaacaaactataacagagattaggtgtcttgcgggctttgttatcataatgtaatctgttcctaataaagcttcattgaatgtaatataccaattagaatgtttacaacactttttctgcaccgttactatgggatttgaaaataaaaaagcactaaacttttaatgaaatacatcatttttgataataaatatcagaagtaatgtaatatttcaaaagtttagtgcatcaaattatttcttatttgtagcatgtgtttccatcgtttttacaatcaaatcagtcagcgctttactacctgcatattctaagtgaataccgtcatatgcaaagtattccggatgacctgcagaagctttataccaatcgactagatgtacattagagcgcttttcagctgcctcataaattaatttatttattctaccttcataatctctaggtactctaatagaaactaaatatatgtctgcttttccaaaactatccaatagttcatttaattgatctttcgtaaatgccccatttgtaccaagctctactacaactttttgaccttttttagcatagtctttatattgcgatttcacaattggtgtagcatcaacgagttgccgtccaactttaccatcaatttgtgcatttggtattttcttagtaaagacattaccaatatccaccatgaccgagtcaccaattaatagtggtgatgactttttaatatcctctttgctattcgctgtctgcttatcctcttgcttatcttttttaacgacttttttcttcgttgttttaaattccgtcttcttctctttcttctcggcttcatgttgtttgccaagtgcatcaaactgtccactgagcacaacgatagacggaaccaataataggataactaacactgttctagcaaattgccccttctttttaggtaaaaatgcaaaagctttaaatccttttttacgtataggtgtttcaataaagcgatacgaaatttcagccattaacgctgttaacaaaatttctataatataaacgtataccggtatttgtccttgtacgtaataactgttcacaaaaacaatgataggataatgccataagtataagctatatgatcgtttacctataattagtaaaggtttcatacttaaaaatttagcaaataaactagaaggatgtaccgcaattgcaataatgaataaagttgcaaatgatataatgtaaaatcctccattatagatccattgatcttggtctccaactataaagaacaaagtcattagaaccgcaaaaccagatatccctataatatctaatgatacgacaatctttttagaaatatcttttttcaaagcaaacggaggccaaataaatgctaatatacaaccaagcaataaagtttgcagtcgtgtatctgtcccaaaatacacacgtgaattatctccagtgatgaaatgaatcactatcataagtcctaaagaaatcaacgatacaataaatagcgtttgaataatatttctcggtttaaatctatgtaataagaacgtgataaccaatgggaaaagcaagtaaaattgttcttcaatggctaaagaccataaatgtttgagtggttcaatagcaaattggttaaaataatctacattctgtgaaatgtaccaccagtttgaaacatagaatatagctgcaatagcatctcgtttcatttgtataatcaattccggtttaaatatcagtgtgaacgtaagcacgacacagattaaaaataacactgccggaatgagtcgtttcaatcgtcgcttccaaaactctagcaaatcgattttttgcgtccgataatactcacttatcaacaaacttgttattaaataacctgaaataacgaagaatgtatctactcctaaaaagcccccacttaaccattgtgcattcaagtgataaataatgattcctataactgcgaatgccctcaatccatctaatccaggtaagtatcgcggggaatacattttttctaaacgtttaaagtcttttgtatccatgttaataaacgccccatttatttttctctattttgtagcatatcacaatatttttgaaaataaaatattgcactgattttcattaattgatttaacccttaattaagatagttttaaattttttattaagtagaaaacaattattacagttaatttcattactgcaaaccacatataaatttgtcgattttactacataacatagattatcatagattcttgaatttttagcaaaataactgttattttcattatatttttacaaaaaaaggttcgttttatattttatgcatattactgtaacagaatcattaagatatgctattcgaatttacttttaaaaagttgaataaactgataaactaccgcgcactgttattaaaatatatccacggtgatatctttccaactcactttcaaatttaaccatatgaaatgacaaatactcactccatattgaagtatttgtgtaaaaagaatcatggtgtattgtttatttcgccttatctaatttaatagtgacattaattcttctatcatgacattaaaatcgtcaggaataataaaataacatcctaacctctagaatcagactttaatttctaataaaaaaactctccccaatttctatgggaagagctatatatttaatgtctaaacattacttttatttattatgaaggaattagaatccccaagcacctaaaccttgtgctttgtatgctttaacagctgcgttgatttgttggtcaacagtgtttgttggaccccaacctggcatagtttggaataaacctgaagcacctgatgggttgtaagcatttacttgaccatttgattcacgagcgatgattgcagcccatgtagaagctgaaacaccagtacgttgagccatgatttgagctgctgatgaaccagtagcacctgcagtattaccattgcttaatctcactgaacttgaagtagttgaagtgctgtagttatggtaagttggagctgaaacagcttcaacgtttgagttacttgattgtgcattgtagcttactgattgtacatttgaaccttggttgtatgaagtagtgtagtctgcacctgcaacgtttgagaaaccagcagtttgaccattagctgcttcatagctccatgaccatgtagtaccatttgaagtaaagttatattggaaaccatcttttacaaagtggatgtcatatgcaccatctttgattggagctgcatttaattgatcttggtgattatgcgctaagtcaactaagtgtgcttgatcaacgtttacttcagcagcgtgtgcttcatgtcctgtgcttgctgcgtaacctgttacacctaatgccactgctaatgatgatgccataattgtctttttcatagtaaaaaatcctccagtaataattgtaagtttatgtttttagtaattatattttgaatttgaatgtcgtagtgcaagtttaaattgtcttttatttctttcaacggtactcactatatcacaaaaaaccagccagtaaattacactttctttacaaaacattacaatatcaagtgttatttgtaatgttgaaatatggctgttttatactgtaatgtgaaatatgtgccctttagaatccaatcaacccttgaaatagtctttaacacataagatttttactatatttagctcaactattacagctttcgtaatattacagattgtatttttgttacatagctgtaatatatctgacatgtaacttctcttattttcgtacattaaacgcaattaaaaagcaatcaacacatatgtttctacacatgtattgattgctattattgttgtatattcaaagttttaaaacacacatcttttgtgaattgtcttatcttttattagcgcaaataaactgcagctcaattatattgttcaacttcattctcgcaattcacaataacattaaataatttttggtctcatattttcaaaaaacatactgttattatcccatgaatttaaaaatatcattagtatataaacgaaacactttacgataaatgatatctgcaagccaagctgttacaaatggtacaacaaagaacgctactacaattagtaagacactcaaccaagcagaatcaacctccataaatttaaatgcattaatcggtcctaccattcctataaaaccaaatccagctgattctttcgttccatgaatacctactaatgctgataccaaacctgatacaatggctgttgtcaatattggtaacataagaattggatatttcaccatattaggtatcatcattttaacgcctccaaagaagacggataacggcacccctaaacgattcactttacttgtaccaattatcaatactgcttcagtcgcggagataccaattgacgctgatccagctgctaaacctgtaatacctatcgcaaaggcaatggccacagttgatagtggcgaaataataataagactaaataccattgaaatcaaaatactcatgacaatcggttgtaattctgtaaaaccattaaccatattaccgatggctgttgtaatcattttcgtatacggcaatattaaaacaccaattgcacctgaaataccgccaacaactgttgggaatacaatcaatgccatactacctacacgatgttgaataagtaaaatgaacaacactgcaatcgctgctgtaatcattgtattaattaaatcaccaatacccgtaatcatccaagcaccatttttaaactgcgctgcaccgcttcctacatatgctgcacttgccacaacagcaattgctaatggcgataggtcaaatttcatggcaaccaatgcaccaatcaaagcaggtactgtaaattgaattgcaacgacaacgcctaataacgttttaaaaatcggatgataatccataaagtatttaaaaatttctccaagtatcgcattaggaactaaacccgcaacaatacctatggcgacacctgataaaactctaaatataaaatctttgggtgtaattgttttaattgatgtcataatatcatccttccatttatgtatatacatctgtatgcaaataataaagagccttaagttataagctgccactagcttaaattctaagatgtgcatgccgatgttgttatatttaggctagcagtatcatctataactcaagactatgaaaaatagtatatcacaaaattctgaatttttagataaagaaattggcaatttttcaaacatattgttacaatacacttttattttatcttcatttttaaaatccattaatacaatagaagaaagacattcaaatgcttaccaaaaaggtacattatttgttaggagcgtatcagcacttacatatcatcaacacaattgacaatataatagaagatactgataataagtgttaaaacaacagatgttaggtagtgaacaaatgatggaaagtaaatccatagatccaagaatcgttagaaccaaacaattgcttgtcgatgcttttcttaaaatttctagagaaaagaaattatctcaaattacagttaaagatatcactgatattgctacgctaaatcgtgcaacattttacgctcatttcactgataaagaagacctcctagactacacattatctgtaaccattttaaaagacttgaatgataacttgagcatttctaatgtcattaatgaaaaggtgctgcgtaatattttcatttcaattgcgagttatatcaaagatgctgcaaagtcttgcgaattaaatagtgaagcattttgcaacaaagcacatcaacgtattaataatgaattagaagatatttttgcgattatgttagaaaacagctatccggagcatcaacgagatatcattgtaaatagtgcgagttttttagcagctggtatctcaggcttagcattacattggtttaacacgagtcaagagacagccgatgtgtttatcgatcgcaaccttccatttttaattcatcatatagcacatttttaacaaaacttggtatttagtcatgcatcttgaaatcactatgtgacttaggttcatacttgtacacacaataaaatttaacgtattacgattgattagccgtgtctaggacataaatcaacgtcctatactctacaatgtcatattagcagtcgttaactgaatgaaaataagcttgtcattaaaacataaagattttagtgacaagcattttgtttttgcgtacttaaacaacacttcaggcaatatgttgtttaggcaacaaatgatatgtgcgtgtttattggcaaacgtacgacatagtagtatagtatgtctaaacaacatatgttgcatagttgatatgcgttgtttaaatactaagataggagggattgacgtgagcgagacagatgaacctcaggggtttgaacgcacgcataatatattaaatattaatcagagtagtctgggtgtagtgacatacattacaaataaattaaagtcgacgttgaagcaacacataataattgctcgtggtaaaaagcgaatcgactatcgactgtcgtataacttttacactacgtattatgataatgtagaaatcaagaaaatcgactgtgaatatacctatgctatgcccattgcaattttaataagacacacgatgtcattcgacaatgctcatttctttgctcagttacgtcatcctgtcttataaaacaacattgcagacatgtatatcaaacgacacttcaataacatcactttgccatcgtactactattaaaatcgtgtctcaaaccccttattttaattccaaaaatctgctggtcaaaagaccgagaaactaaaaacattactggatgtgttgataaattatcttatagaaataaactcaaaatatatcaacacttgattctaaggaggatatgacaatatgaaaattttagatagaattaatgaacttgcaaataaagaaaaagtccaaccacttactgtagctgaaaaacaagaacaacatgcattgcgtcaagactacttaagcatgatccgaggacaagtattaacaacattttccacaataaaagtggttgatccaatcggtcaggatgtcacaccagacaaagtttatgatcttcgccaacaatacggttatattcaaaattaatatttgctcacgaggtattgcacttaaggtgccaactgacctcataaacaaagcccatactgattgaagacactaatgtgtcgcaccatgtctcttacgacatgtgcacattaaacttcatctttgtatgggctttttatttattcttttgagaatttcattttagcagactaaaaaattaaaatggtgtccatcaagatctttgaacattgcaccataaaacccttggcttactgttggttcttgaacgactgcgccacccgcttctttcactttattcaccaactggtcaacttcttcatttgtgttcacacctagagaaatcatcacttcatttggttcagtattaaggctttgctgacttacattttgaaaatgcttgttttctattaaaattacggttgtttgacctatttgaataccgaccattttatctaacatttgtgggtttctatttattttaaatcctaacgctttataaaactgtgcgctcttttctaaatcttgcacatgcaaattaaaccacattgattgaatcatgattgcaccccattcattacttattatagttttggactttaagccaatcacttaatgataatcttgttggatttatttcagccattaattcaaagtctacttcataacctttttcttccaaccattgcttttctgcaacaccactaacaaattctccttctataacagtagatttacctgtcacttcactaaaaattgttgctgcttcacttaatgtaacttcatcggaaccaatctctattgattgatgcgtaaagctttgtggatgtgcaaaaatatacgatgcaattttagctatatcaatagaagaaatcattgtgaattttatattcggattaataaattctggtaatgtaatacgttcatcttcgactttagcaatgcgtaaaaaattatccataaagaatgatggtttgataactgttgcatttatattagattccattaatctattttctatttttgctagtacttcaaagtgtgggccagttcgatttcgattaacccctcccgcagtactatacacaatatgttgaatattttcttgctcagctatttcaattatcttcataccttgtcttaattcttcgctaacatcatctttaacgattggctgaatactgtataagccatacttccctttcatcgctgattgcaaactaacattatcactcagatcaccttcaacgattgataaatgcggatgtcctatgtctgaaagtttacgattattcttatttctagttaatgcacttacataccatccatcctctaacaactgttttacaactgcattaccttgcttccctgttgcgcctattactaaaatatctttcattttagatccactcctctttttatcttaaaaaccaatagtcctctttttcaccttttaaatacgtatatggttctggtgtttgtccatttcctttaatattgtcgtttattacatctctgacatcccatactaaatgaataaatcgttgtaattgatgactaaaaatgcctagtggcgctgtcatagctaatagtttttccacatcttctgtagtgacattcagtttttcagcaatcatttgaaccgataaggtagattcttcaaaatgtgcttgcaactcttcagctgtgatgcgtctttgctctttatttaaagacattatcaacactcttttcttttatgatatttaatagttattgcaaattcattgctaactttcttaacacgttttataataaacggagagttatccgtttgtcaattttagagaattttaagtaggtgtaatcatgcgaaaagatgcaaaagagaataggcaacgaattgaagaaatagcgcacaaactttttgatgaagaaggcgttgaaaacattagtatgaatcgtattgctaaagaactaggtatcggtatggggacattgtatcgacatttcaaagataaaagcgatttatgctactacgtcatacaaagagaccttgatatttttatcactcattttaagcaaattaaagatgactatcattctaattatgaggttatgcaagtgtcgttagattatcttttacaatttaaaatcgataataaggcactactgcaatgtattgaagcaggcaacaataaattacgtttttaccaaagcgcattttatcaagaattatttgatttttattatgacttatttaaaagtgatgacgacacttacacgaagttcaaaacagatatgctgttgcaatcattatcaactagtgtatttgccttccaaatagagcatcgccatatttcaattgaagcgtacagaaattatttattaaacatttatttagatgaggtggaacgtaatgactaaaattgtgttaatcacaggaggcaataaagggttaggctatgcaagtgcagaggcacttaaagcattgggttacaaagtttatataggttctcggaatgatgtaagaggacaacaagcatcacaaaaattaggtgttcattatgtacagttagatgttacaagtgactactcagtcaaaaatgcttataacatgattgctgaaaaagaaggccgtcttgatatcctcattaacaatgcaggtatatctggtcaattttcagcaccttccaaattgacacctcgtgacgttgaagaagtatatcaaacgaatgtattcggtatcgtacgaatgatgaatacattcgtccctctcttagaaaaatctgaacaacctgttgtcgtcaacgtatcaagtggtttaggttcatttggaatggttacaaaccccgaaacagctgaatctaaagtgaattcattagcttattgttcgtctaaatcggcagtaacaatgctaacgctacaatacgctaaaggattacctaacatgcaaatcaatgctgctgatccaggcgctacaaatactgatttagttggtgattttagtaataattccaaacacgtttctgaaggaatcaagccaatcattcaattagcaacgattggtgcagatggcccaacaggtacatttattaatggcgatggagagatgccttggtagataaattttatgttacaaacattgaaattagaggtatataaaaaatgcttctgcaatagatgcaatacaatatggaggcgaattaaatgaaaagtattacgtttgaagaacattatgtcattgaagatattcaaaaagaaacgatgaatgcgatatcagcagatcctaaaggtgtaccgatgaaagtaatgttagaaggccttgaaaaaaagacaggttttacaaatgccgacgaattatcacatcatgatgaacgtatccaatttatgaataatcaagacgttcaaattcaagtcttatcttatggaaatggttctccttcaaatttggttggtcagaaagccattgaattatgtcaaaaagcaaatgatcaattggcaaactatattgcacaatatcccaatcgctttgtaggctttgcaactttacctatcaatgagcctgaagccgcagcgcgagaattcgaacgttgcatcaatgatttaggattcaaaggtgcactcattatgggacgtgcacaagatggttttcttgatcaagacaaatatgacattattttcaaaacagctgaaaatttagacgtaccgatttatctacatcccgcgccagttaacagtgacatttatcaatcatactataaaggaaattatcctgaagtaactgcggcaacatttgcttgttttggttatggttggcacattgatgtcggaattcatgcaatacatctagtattatctggcatttttgatcgttatccaaagttaaatatgattattggacattggggtgagtttatcccattcttcttagaacgtatggatgaagctttattcgctgaacatttgaaccaccctgtaagctattactttaaaaataatttttatatcacaccgagtggcatgttaacgaagccacagtttgatttagtcaagaaagaagtaggtattgatagaattctttatgctgctgattatccatatattgagcctgaaaaattaggtgtatttttagatgaactgggtttaacagatgaagaaaaagagaaaataagttatacaaatggtgctaaattattaggtttatcacctaacaattaacaaatggaggtcattgaatatggaaactttagaattacaaggcgctaaattacgataccaccaagtcggacaaggacccgtgctcatctttattcctggtgcaaacggtaccggagacatttttctgcctcttgcagaacagttaaaagaccattttactgttgtagccgttgatcgtcgtgattatggagaaagcgagttaactgaaccactccctgattccgcttcaaaccctgacagtgattatcgtgtcaaacgcgacgcacaggacattgccgaacttgcaaagtcattaagtgataaacctgtctatatattaggttcaagttcaggttcaatcgttgcgatgcatgtgttaaaagattaccctgaagtcgttaaaaagattgcatttcatgaaccaccaattaatacatttttaccagacagtacttattggaaagataaaaatgatgacattgtgcatcaaattttaacagaaggcttagaaaaaggcatgaaaacatttggtgaaacattaaatatcgcaccaattgatgcaaaaatgatgtctcaacctgctgatactgaagaaggacgtatagaacagtacaaacgtacgatgttctggtcaaaatttgaaattagacaatatacgcattcagatattactttggatgatttcacaaaatacagcgataaaatcaccctactaaatgggacagattctagaggctccttcccacaagatgttaacttttatataaataaagaaactagcatacctattgtagatattccaggcggtcacttaggttatattcaaaaacctgaaggctttgctgatgtattattaaatatgtggggttaatctatcgttctctaataaaatagcttggacagttttcaaattatatttgatggctgaccaagcttatttttatttacgcttaaacgttcaaatcaactcgttattatacatgaaggcatgttaaccattctcttccactgaaaacactactgttccaaacattgatagtcttcttttgaaataccctttccgataagcaccaaatattctggcactttttttgaaaatgctacaggtgttaattcatattgtccttgtgtaaattgaatgagatacgtatgtgcggtgtcttcaaatgtcataaaccctttcaacctataaatatgagacggaaggcatgctaaacgttttataaactctgctttagtacatttgactggtgattgcacaaattgatgattaatcatttgatgtaacgacttatgtttattgtcagaagttgctgtcatttgtctaactgatattggcaaagtgacgctgccatgcataccgacttgtatatcggcctctgggttaataacttctaaatctttcaatagtttgctcgttgtttcaacatctgctgaatctattttattaacaaataagacagaacaatatgctaattgctcataaaataagccttggatgtctttagggaatgatttaatgtgtttatacatgcttgcgtctattacaccaatcatatgtgtaattgttgtaaacggagctaaaataggcgttaaacaagcatctaagacagagactggttctgcaatcccactacattcaataaatacaatgtctggttgctcttttaaatataattgatgtaactgttctgatacatctgctttcattgcgcaacagatacacccctctgtcagttcacttaaaggtatgtcttcagatactaaggcaccatcaacactcattttcccaaattcattcatgatgactgctggtttcagcgattcctttaatgattcagcgagcaaatgatttaagacagtcgttttaccgccacctaaaaacccacctataataactattttcatctgcgactctcctcttatacttcatatgaatagcatattccaagatagatctcctattgactgacatgactctatattcagttatagttcatttttttaaataatcagcattactattttaacaatgatgcctacaccaataactaaagacaatgatgtcaccatttgctttccaattaattttagtgctgactgaccacctaaatgtttcaaaagcatcgtcattgtgaccgagcacgctgtaaatgttgaactaaaaaacacaagtagtagtaactgtgttgctgtcattccttgtaataaggcgccctgatgcaaattaaacaagagcatgccgtcttttcgaatcattgaaaataaaatccctggtgacaattctgacgagatgcctaataacgataatataggtgtaaatatttgtgataaaacattcaaaattggcgttagtgataaaatactaacaataagacagattgtgataaaaataggtagcgcttgaacgataaacatttgtatattttgccacatttgtagcaacatttgacgtatatttggcatatgtaattgcctatcataaggtagcggaacgctaagttgttgatcattctttttcaaccatatcctattatgtaagatgccacctaaaagtactaatattaagtacggcataaatagccatgactttccagctacactaaaaatagataatgtcgcacctatttgataactacaagaactaccaaagcttattaaactcatacactgtgtcttcgtgcaggtatggcattggtgtgctgcttgtgaaatagctgctgcattacatccaaacccttctaatagtggcacgatatcattaccttgtaatcctatccgtaacattgatggttcaattgcccatatcatccatgatttgaatcctgtttgatcaattatagcagttgataaactaatcaatattacaaccggcaatgcccatacgagcgaatatgttccaagtgatagcacaccataatcaccaaataatatatgctgtaatatatcgtgattgagcaatgttgtttgagttaaatattctatccatgctgatacatactgattttgaaaccaatctgaaaattgataagcgataccgattggtaatgcaaacattaaaaatatcaacaaccaggctaaaaatgtcgcacttattttaggtcttaaatgtcgtcgctcatgttgaaatagtgtcaattgttctatcacatgttcactcgctataggcgaagaaactacactttctgccaatgaaatatctaatttctgttttatgattaataatcttaatttcgctttttctgttgcggtaagtttatccgcatgactaataaccaaataatgaggttcattaggtatgggcgtataatgcccagttctcatatcatatttcacttctaacatgtgcatgacacttcacaacatgaataatcatctagatacatttgatttttttggtaattttcaatgacctcttgtttagctggtaagccttcccgctgtgttaaaagatgggcaagtactgcaaatcgcgctctgaatttatagatatagcataatttggcattatcattttcaactgtcgcaccaatcataaaaatattcggataacgtgtcgattcatcatgtgttgttaatttaatatcttgatttgttgtcgcaaataattgttgaacgattggattttttgttgcatcaaagccagttgctagtattggttcatgaggcgtatgcacactttgtccgctatcaaaactgatatgatactgtccattgttaaaatcaatatctttaactgtataatgtacattcatttcgatgcgagcaccttgcttaatgacattacctagtcgctgacgtgtataaggtgacaatctaacactaggatcagcatccggatcatttaaaccggttgtgctagtataaagtgcgatgtcagagccattttttgcaagttgatatgcagcatcaaagccactttcattacctccgataaccacatattgtcccttattaaagttatcaaagtcttcaatttcactataatgaataccatatttaaatggctttttagggaaattataatcacctgttgcgacaaagatataatccgcgtgatatgtctctgttgtcgttgcaatcgtataaaatgcatcatctacagatatatttgtgacaactgtattttcaaagatattcagctcgtaatggttggcaaccacttgtaaatattcagcatatgtttctccggaaatatgttcttcattaaatgtaaatgctggtgaagtatccatggaaattgcattcatatcaggcatgccaaatccattagacgtaaatgatggcgtaatcgtaagggtcgatttcggccaatgtttaaatgaatgtcctactgttcctttttctaaaataatgacatctgttataccgaaatcttttaaggtaatggccatacctatacctgcagcaccggcaccgataatagccactttatgatgttgcatattaacactccctcaatgatctatttcaagttattgtttttggttataaatcgtaataattacgatttataaagtatagacctatccttgagaaatttcaatattaaaagaaaaacttccgctattgtagaggattcatctacatttcggaagttggtatgtgtcttttttttaaaatttaaggatgctacgtttagttcaaatgattatgaatgacatttcatggtatcatccagcctcagtacttggagataacattttggcggtgagacagaaatcatatttttacaaaatttatttcgtcgtcccaccccaacttgcacattatagtaagttgactttccgtcagcttctgtgttgggaccccagctaattcatcatttttgagcctagaacatttatttatgtctcagattcttacacattagccgcagcccaggtgtgcttaaaaaatgggaatacatgtgtaaagctcatgcataagaaatactaatttctaaagataaagtatttctttattgttgtgtaacttctccacgttgtatttcactatccaaattttgtttcatattttcaaacaactcttgaaatctaacctcatcttgatcagaataacctttaaaaataactgaatctatattttcttcgttaaaataataaatttcatcttccacaacaccaatcggatatttacatgcagaatagtcaaacatatacttttgattttcaatttctacaattggtcctctattaataatcattaacttttgcgaaccttcttttaaataaataatgcttcctattgtttccatttattttcctcctttgtcaccgtctcaatttcaacattccttcgcatttccaagtcaatcatctcttcttccgctttacgaatgccatgttgaatttgctgttgctgctcgtataacgcttccgttgaacgtcgtttcgcaaaatgaaattcatcgcggaactgttccatacgactagccatattgctactataataacgctcacctaaatgttgatataattgatctatcgaatgattaagcgcatcactttcatctatcaatgctttaacctctcgcttttcatcatataagtcatccatttgcttatgtttcgctgtgattattttattgatttcatccagtttattcgacatcatttcaccacgttttaatttttaccaatttcattaccaatcattacgtcagtttggtcaaaagcctcaccaactttttgtatattatcgctcgcagttcgtattgcttcagcaacagattgattcttactcatcaaatcatctatcacactatgagcattattatttccacttactgttgtactttcatctttatccggtttcgacacattattacatgtttcaacagcgcttttaatagatgatgatgcactattagtcttgaaaatatcactttgaactgtactcatcatttacacctctctccatttaaattattttaaaattattagaaactgtatcaatatatgatattcaaacattcaattatacttaaatattgttttatgattatattcaaaattattgtatcaataaatatgtatcattcctagaattttattgaacaaaaagttataaaatcacttttattgtaactcaaccttgttttacattacagaaattaacaatagcgattaaaattttattttccaacaataaaaaagcacaaatatttttattgaggcagctgaaggccttctcatagcaaaaatatctgtgcatattattatctcaatctaacgtaataactaacttgttgtatcttgtaaaatcttatccatagaatgcgcaacactatcacggtacatctcaccaaatttcaataaatggaccatcaataaatataaacgataaaattcaagtctataggatgcaccttttgcgagtggataatgtttattatacgcatcataaaattcactcgtaaaaccaccaaataccgttgtaataccgatatcgaattctctgtcaccatataatggcgctggatcaaataacgccggacgaccatcttgtaagaacatataattaccaccccataggtcaccatgtaataaagacggtttactttgatgcttttctaattccgccacaatttgacgtcgcactttgtcatatactttgatatcgttggcatcccatagccctctatttagcaactcatctttcaaatggtccatgcgcttgtcgacaaaaatggtacaccaatcgtcttgccaatgattatcaaaagaaatatcgccaccttcataaggtaatgagaagccaaatttgccttcttcttgttgctgactgtgtaattgagctacgagttgccctaattggcgttgactccctgaagccccttcttctaaatacgtcatcactaaatacgcatcaccgttaacctcgccacttgcaattactctaggtgccgtgatacctgcacgttcaaattcatttaaacctgcaatttctgcagcataaaatgattcttttcgtccacgttggacaagtaagaaaaatgtatccgtatctgtttcgactcgatatgcttcgtttacatcaccaccactcactggtgaaatctctttaatatcttttaaaggtaaatgctctaaccattgttcattcatacaaacaccttccaatctacttactttatattataatattgcctaattaggatgatttaatcttaaaaacgttattcaaacttgcgtcaattttcaaaactttttagttttaactaggaaattatgtagggaaatgctagtctattaaaagaatatatttcacatatattaagttgaggatagtaagcctcaaatataatgaaataggagcatactcatgtacaaattaattaaacctttcttattcaaaatcgaacccgaaaaagcacacggactaactatcgatgcattaaaaacgttacaaaagtttccggttttattcccagtcgtcgataaactatttacttataagaatccaacgttatcacaaacgatacaaggtaatacgtacgacaatccaattggcttagcagctggtttcgacaaatcttgcgaagtaccaaaagcattggaacaccttggattcggtgctttagaattaggtggtatcacacctaaacctcaaccgggtaaccctcaaccacgtatgtttagattattagaagatgacgccttgataaatcgaatgggcttcaataatattggtatgaacaaagcactcagtcatttgcgtaaaaatgcttatcaagtacctgttggtatcaatgttggtgtgaataaaatgacaccttatgaagcgcgttatcaagattatataaaggttattgatacgtttaaacacgacgtttcatttttcacagtcaacatcagttctccaaatactgaaaatcttcaaaacttccatgataaagatgaattttcaatgttatgccaagctttaacagcatttaaaaaacaacatgatgtaacagtgccaatttatttaaaactaacgtctgatatggatttcgatggcttaaaagcactattaccagcgattactgagacatttgacggtatcatcttagcaaacacaacgcgacaacgagatggtttaacttctgctaataaagtcgaagaaggcggtttgagtggtcgtccattatttgaacgtaatttaaaattgattaagtatgcttatcagcaaacaaatggcgaatttttaattataggtacaggcggcgtattcagtactgaagatgcaatcaaaatgatgcgtcacggtgcgtcacttattcaaatttattcatcacttgttattgaaggcccaggtttaactaagaaaatgaacaaaggcatcgcacgttacttaaaagatcatcattttgacaatgtcagtgatattataggactagatgcctaatccaacatagtcaaataatactttaaaacttgctgaatcgtcttattaaaattatgatataactcaagaagatatatttatcaccatttttcaaaataatggcttaaatatcacatatcattaaatatagcgttttataacggaggcgtttgttatgactaaagaaacagataataaaaaaacagtagcgacttctgacaacaaagacacacagcaacaaaatcaacctgaagaagatgaacgtcaaggtttgaatggttatcgtaaaacagatcttgatttagaaatcgagcaagagctacgtgaaatgatgaaaacaggagaaaatgaaacgaaaaatgactacaaaaagtttaaagtgttttcacttatttcaacacttgtcattgtcattttagcaattataagatttgttcataaaatgatgtaattagagtgagacattgttttatgtctcagaatccagttattcattatagctacaatatttacgattatataaataacccgagattttagtatgatttatttcactaaaatctcgggtttctatttgataatttttaatagggcatggcttgtatatgcgcctgccttttatctcatttccaatgattaatctggatattgttctaaaaatgctttcgcttctttattaactgttttaaaatcaataccttgttgcatcgctgcaaagacacatccacaataacactgcctaaagatattatagtcattacacatttctatggaacgctcataacctttacttttcttaaaatcacttggcaaatagttcacatcgtatattttttggacatccataccaagttcattgattaattgtgcgttctttttaggtgataatgtgattgcactgccaaaataatcatagccatgttctacagctgctttcgctacaatatccaaacgcatttcaaaacaagtggtacaacgtaagccgccttctttttcatcagctaattctttatccttcaccattttcacaaacttatgcggttcataaggtgcttcaatatacttcacattcgcaccagtcttgcgattaaaatcttccacaaattgttcttgcactttagcacgtcgtaagtactcatttttcggatgaatatttgaattcgcgaaataaattgcaatgtctgcatattgtgttaaaaactctaatgtatatgtactacaaggtgcacaacaactatgcaataagattttaggtctgattgcttctctttcccactgcccgattaatttcttcaacaccttgtcataattaattttttgatttttcattttactgataataggttcagcattaatcatgatttaacctcccacatttaatcattaacttctattatatatgattcatattaaatgtcagtcaaaaaagttagaaattcattttaatgcatttatatttcgaaaatcccttatgtatctaaaagcattttttaaacttgaattttaaaacactaaacaacacatacgtctctgtgtcattttcattttttgtatgtcatatatatgtttacttcatttaaatcaatttcatcttataatttatcgtgtattttacaaaagattgacttcaattcatcgtaaaagttatacttttgccattttttaatgtaacatggtgttagtaataaaaataatacattgaggtgttttacatgacagcattattcccttatatcgcttttgaaaattcaaaagaagcccttgcatattacgaagaagtatttggtgcaactgacgttaaacgtttagaagttagcgaagaacaagcgtcacattttggtatgactaaggaagaagcgcaagaagcaactatgcatgctgaatttgaagtgcttggcgtaaaagtgctatgttctgattcttttggtcgcgctgacaaaattaataatggcatatcattattaattgattatgatgttaacaataaggaagatgctgataaagttgaagcattctatgagcaaattaaagatcattcttcaattgaaatagaattaccgtttgctgaccaattctggggtggcaaaatgggcgtctttaccgataaatacggtgttcgttggatgttacatggtcaagactatactgcaatccaacaataatgttattgataaagatatcatttaataagcttatgttatttagcaaggcaagccactctcgattcatggcttgccttattttattgtatatttttaattatcgttgctggcccttgattgacaatcgtattaaaatgcattattaagtcaactttgtctatacggtttggatcttctacccaatgtcttatcaaagacaatcccgcacctgaaacataactcatgaaataggaaaatggtataccattaatttgatcattttcatttttataacgttgtaaatgacacataattaaatcataaagtttttcgtggatatttgaatctttacccatacgaaacatcaattgataaaatgcgatgtctttttctatcatttctattaaaacggtcataatttgatgtatgttatccgtggataacttaactgctccatttaacttctcatcatgaatgaagtctcttatttcctccaactgctggtcctctaatttttcaagcaaatcatatttatcataataatgcgtataaaatgtactacggttaacatcagctaaatctgcaatttgttgcacagtaatctcttctaattggtgttgatgtaaaagttcaataaatgcatttctcattgcaacttgtgattttctaatacgtcgatctatagtcatttgtatcaagtcctccccaatgattattaacaattataaacgttatgttcattatcccacaaatctccaacattgatgattggcacacaatgtttacctgtttaatataggtgatacaaacaaacagaaaaaggtgataacaatgaaccaacatttactaggaaatccaaaattaactgtaactcatgtcaatgaagtgaaagccggtattaaccacatcgttgtcgacagtgttcaatatggaaatcaagaaatgattatggaaaaagatgtcactgtggaaatgcgcgatggcgaaaaattatatattaatattttcagaccaaataaagatggcaaattccctgtagttatgtctgcagatacttacggtaaagataataagcctaaaatcacaaatatgggtgccctttggccaacattaggtgccattccgacatctagttttacacctgaagaatcaccagacccaggattttgggtgccaaatgattatgttgtagttaaagttgcattacgcggtagtgacaaatccaaaggcgtcttatctccatggtcaaaaagagaagcggaagattattacgaagtgattgaatgggcagcaaaacagccatggagtaatggaaatatcggaacaaatggtgtttcttatcttgcggtgactcaatggtgggtcgcatcattaaatccaccacatttaaaagcaatgattccttgggaaggattaaatgatatgtatagagaagtagcctttcacggaggtataccggatactggcttttatcgtttctggatacaaggtatttttgcgagatggacagataatccaaatatcgaagacatgattcaagcacaacaagaacaccctttgttcgatgatttttggaaacagcgtcaagtgccattatcacaaattaaaacacctctactaacatgtgctagttggtctacacaaggtttgcacaaccgtggctcttttgaaggatttaaacaagctgcatctgaagaaaaatggctatatgtgcatggacgtaaagagtgggaaagttactacgctagagaaaatctcgaacgccaaaaatcattctttgatttttaccttaaagaagaaaataacgattggaaagatacgcctcatgtcatttatgaagttagagatcaattttataaaggcgaattcaaatcagcgtcagcgttccctttacctaacacagaatatacaccattgtatttgaatgctgaaaatcacacattgaatcatgcaaagattagtagcgcgcatgtcgcacaatatgactctgaagataaacgacaagatgtaagttttaaatatacgtttgacaaagatactgagttagttggaaacatgaacttaaaactatgggtaagcactaaagactcagacgatatggatttatttgcaggtattaaaaagttagatcgtcgtggtaatgaagttaacttccctgattttaatcatattgaaaatggtcaagtagctaccggttggttacgcgtatcacatcgtgaattagatcaagaaaaatccacaattgcgcaaccttggcataaacatgaaacagaattaaagttgtcacaagatgagattgtacctgttgaaatcgaattgttaccttcaggcacgctatttaaacaaggcgaaacattggaagttgttgtaaaaggtagtgaaattgtaattggtaatagtacccctggcatgaaaacgcgttatgaacatgaagaaaccgtaaataaaggcatgcacatgatttatactggtggtaaatatgattcacaattaatcattcctatcgttaattgatatgcaacaattacggttgcttttgattaaaagtgacatagtgataggactgtataacaagagaagaccacacacttggaatcttaaaccaaggtgtggccctttttattattgatggctatttaattttataaatcttgtcactaaacttactacaagcaatattaaaccaataaataaagccataattgctgtattactttcgttgtttactcctgtttttggcaattctttcaattgttgcttatgtactgacttgctcttgctatccaaatgaatactttgttgtttagccatttgtttattactttttgtgtgaatatcatttgctttaatacttggatttacagcactattattcgatgttccatttgcgtttttcaactgattaataacatttggatctttcgtgccatctattaaattatctggatgttttagtaaatgtctgcagtcggatactattttagaatcttttgcctttaccgcattattcggcacctcattatcatctttcaactgcttgataacatctggatctttcgtgccatctattaaattatcaagttttttcacacgtgctatgtcactaactggccctggataatttgcatccggttgtctaactggtattaaattgctgttttcattcacaccttcaggtttgttattttcggcgttcgcattatccgtaaaaatcaacactgataaaattgcaacgataatacctttacttctattacgctaacccaattggcataaaaataaaaacccctaatggataactacattgttatctactagaggtttctaacttatactattttataacactatcgtattttctttttcatgaatcatttcaataatgacattgtcttcattcattactgctactttaggtgcatggtgtttaatttcttcttcattcaactgtgcataagtcatgattatgactacatcgcctacttcaacaagtcttgatgctgcaccgtttaaacaaattttaccactacctctttcaccagctattacgtatgtttcaaaacgggcaccattattattattcacgatggctactttttcatttggcaagatgtctaccgcttccaatatatctgaatcaatcgtaatgctacctacataatttaaatttgactcagtcactcttgctctatgaattttagcattcatcattgttcttatcactttattcagctccaattattatattatctattaaacgcgcttttgaaaatttaacagctaacgagataaatatgcgtccagttatttcgtgttgttctactaattgaggataactataaacagcaacttcttcaatgcgtccacttatatgtgattcaagatattcagtaaccctgtctataattactttactttgacgttcaccgtcttgatacaacgcttgtgctaatagcaaacttttacttaaatgtaccgcttcttgtcgttcttgctccgttaaataaacatttcttgaacttttcgccaaaccatctgcttctcgaacgatatcaataccaataatttcaacggcatgattgaagtcttttaccatttgctcgacaatagccaattgctgggcatcttttttaccaaaataagcataatccggcataacaatattaaatagcttattaactactgttaccaccccatcaaaatgccctggacgcttcgctccttctaacacatcagctaatggacctactttgacatcaatacctaattcacctggatacatatcttctactgcaggatgaaaaacaatgtccgcccctacttctgatactaattctaaatctttatcaatttgtctcggataagcatcgaaatcttcgtttggaccaaattgtaatggattaacaaatacactcacaactgtaatatcatttgtactaactgattcgcgtaccatcgttaaatgtccatcatgtaaggcacccattgttgggataaaaccaatcgttgttcctgagcgtttggctgctttaacaatgtgttgcatctcttttaccgtagtaatcagcttagtcattgttattaacctcattcataattttctttttatacgtatattcttctgatggaaatgcaccagatttaacttcttgatcgtattgttttaaaccatccacaccaacactaaaatcagcaaattgcttcacaaatttcgctttatgttcaacaccataatttaacatatcgtgataaaccaatacttgaccatctgtaccttttcctgcaccaataccaatgactggaattgttaagtgcttgctaatttcttctgctaaatcatttggaattgcttcaagtactaacgcaactgcaccagcttgttctacatttttcgcatctaaaataagttgctccgctgcttctttcgttgcaccttgtaatttataccccataacgccaacactttgaggtgttaatcctaaatgtgcaacaacaggaataccaattgccgttgctttttcaataaatggtgtaatatgcgctccttctgctttaattgcatttgcattcgtctcctgataaagctttagagcattatttaagtcttgtgtcatagagatgcctactgcaccaatcggcatatcaacaactacaaatgtatttggtgcgcctcttcttactgcacgaccgtgatgaatcatatctgctaacgtcacttgtacggtactttcataacctaatacagtcataccaagtgaatccccaacaagaatcatatcaatacccgctgcttccacttgtttagcacttggaaaatcataagctgttaccatagaaattttagtttgcttttgtttcatatctattaattgacttactgttttcaatgttattcaacctctttttgcagtattattagaaatagtataatgaatcttttatagaaaggaaagaagaagatgttatcagttgcgattatcggcccaggcgctgtcggtacaactattgcctatgaattacaacaatcattgcctcatacaacgcttatcgggagacacgccaaaacaataacatattatactgtaccacatgcacctgcacaagatattgttgtgaaaggttatgaagatgtcacaaacacatttgatgttattattattgcagtcaaaacacatcaacttgatgcagttattcctcatttaactcatcttgcacatgaggacacgctcatcattttagcccaaaatggttatggtcaactcgaacatatttcatttaaaaacgtatgccaagcagttgtctatataagtggtcaaaagaaaggcgatgttgttacgcacttcagagattatcaattacgtatacaagataatgcattaacacgacaatttagagatttggtccaagacagtcaaatcgacattgtattagaagcaaatattcaacaagctatttggtataaattgttagttaacttgggcattaattctatcacagcactcgggagacagacagttgcaatcatgcataatcctgaaatacgtacactgtgtagacagctattactagatggttgtcgtgttgcacaggcagaggggttaaacttttcagaacaaactgtcgatactattatgactatatatcaaggttatcccgacgaaatgggaacgagcatgtattacgacattgtgcatcagcaacctcttgaagtcgaagcaattcaaggctttatttatcgacgtgcacgtgaacacaatcttgacaccccatatcttgatactatttatagctttttacgcgcgtatcaacaaaatatgtaagctcatatataatataaaaagaccttaacgatgcatttagaaccacctgttccttatatcgctaaggtcttttaattatattagactattcagcttctctaatttcttctgccacatctttatagtctattttcgctttaacaaacgtctcgttatttaccgggaaatgttgttggaatgtttcaaagttttgtatctcaacgacaacgtcatccacttcaaagtcaagaacatgtccaccataagctctttcatcatccgcaaaatgtatatgaaaaccagcagatcctacgccatgaaataattctggtgtaaaaaatccaacaatggcaccacgaatatcttgtcttttttcctcaggttgtctgcgtgctgaatcaatcaaacgtgtatatggcggttgctgagcaggcatcattcgtacatgcatatgtttaaatgtgccataaattttaacagccgaaaataaattctcacttaacatttcatttttaatttgtgcgaatacatcatcttgtgataattgttgcaatggaaatgtcttactcgctttaaaattagtaatcgatgcatacggtactttctcatcgccttttaattctataaattctttatgctcgttagcatgatatgcctttccgtctaaaaatattacttcgccatcagaccctgttaacgttgcaatccctaaattcccatgttctaacaattcattaattgtagctgtgccttctagtaagccagccattaacgtacctaatgtaccatgttgatacaagacattcgtcattccaaaaccatctccctatagttattcctcgttgtcatgctctacttcgtgattaatgcagaactactttcctttatactcaatgacgcctcaacatttttattcatgtcactaaattttcacgagtcataatactttattcaattattattttacgcaaaagtattgcctctatcaatgcttgctaaaaaaatggacctatcagtgccacgtgttactgcaacactaatagatcctcttaccattaatatatttctaattaatacttaaaataggcttagtcttctaataaatatttaattgaatcaaatgtatcttctaatgttttaacagatttatcgaacaacgcttgttcttcggcacttaatggcatttcataaattttaactgcgccatgttggttaactaatgttggtacacctaggtaaacgcctttgtgaccaccatattgaccatctaattgtatagaaacatttaagacattattttcattatttaaaatggcttttgaaatgcgcatcaatgctaatgcaataccatagtatgttgaccctttagcttggataatttcataagcagcgtcacgtgtatttacataaatttcttccgctttagcttcgctaccagtttgttcttttaatgtgtcatatactgaaatacctgctacatttgcttgtgaccaaactgcaagttcagtatcaccatgctcaccaataatactagcgtcaacacttgaaggtgcaacaccaagttcttggctaattaaatattgtaaacgtgcactgtccaatacagtacctgaaccgataacacgctctgctggtaatccagtatattcttttacaaatcttgttaaaatgtctacagggtttgccgcgattaagaaatatccatcaaagccactatccataacactcttaacgatgctcttcataatcttagtatttttttcaactaattgtaaacgtgtttcacctggcttttgaggtgcaccagctgtaataacaactaaatctgcatctttacagtcttcgtattcacctgctttcacatcaactggtgaaggactgtggactgtaccatggtttaaatcttgaacatctgcttttactttgtcttttgcaatgtcaataattacaaattcatcagcaacaccttgcgtaaccattgcaaaggcatagcttgatcctacagatccatctccgattaatacaacctttttaccaaatgttttcataattatgtctcctaacctaattgaatttattttacacgtgactacacgtaaaaatatctatactgaaattaaagattaacaattttattttattataatattatgctaccaaattacaaacataaaactgagatgtaagcggagtcaaattacactctatcgccaataaatattgatatctcaagctttagcacgtaatttgaaatttgtgacaatttttagcattctaaaattgcgtaatgacgctatttaaagcctttaacaaactattgacctttctatttttttcattttaaaaaggatggctattcgacttaaatgacttactatataacctactattttccgccttactctcatcatatttgatgcatctttttatagtcaaagaattacatttcatacaaactagccaatcagacataaacatgaaattgattttaaaaatataatgcgcaaaattgttagaaaattagcaaaaatagtacttattcatttaatatctgttataatcagttttatcatttaaaaaatctatggatgttatcaagacaagtcattaatacgtaacataaagttgtgatttttcagaatttttagacaaaatgttgattatttgtgctatgatataacatattaaaaaacaccgtatagagttgtttatgaatgtttgggaggaaagtttatgggaagttttttcaataaaatagcacgaaaagaggatccggctatctatcaaaataaagatggtcatttaaagcgtacacttcgggtgcgtgatttcttagctttaggtgtaggaacaattgtatcgacatctatctttacgctacctggcattgttgctgcagaacatgcaggaccggccgttgcgttatcattcttactcgctgctattgttgctggtttagttgcatttacttatgcagaaatggctgccgctatgccatttgcaggttcagcctattcttgggtcaatgtattatttggtgaattttttggatgggttgccggttgggctctattagctgaatattttatcgccgtagcctttgttgcatcaggattctcagcgaatttacgcggacttgtgaaaccaattggcatcgaattaccagcagcattatcaaatccatttggtacgaatggcggttttatcgatattattgctgctatcgttattttattaactgcattattactatcacgtggtatgtcggaagcagcacgtatggaaaatattttagttattttaaaagtattagctattattttatttgtcatcgtaggtttaacagcaataaatgttagtaactatgtgccatttattccagaacacaaagtaactgctacaggtgactttggtggttggcaaggcatatatgctggtgtttcaatgattttcttagcgtatatcggtttcgattctatcgcagcaaactcagcagaagcacttgaccctcaaaagacaatgcctagaggtattcttggttctttaagtgttgctatcgtattatttattgctgtagcacttgtgttagttggtatgttccattactcacaatacgcaaacaatgctgaacctgttggttgggctttacgtcaaagtggtcatggtgttgtagcagctattgttcaagctatctctgttatcggtatgtttacagcattaattggtatgatgttagcaggctcacgtttactttattcatttggacgtgacggcttattaccttcatggttaagccatttaaacgacaaacatttacctaatcgcgcactagttatacttactattattggtgttttaattggttctatgttcccattcgcatttttagcacaattaatttcagccggtacacttgttgcatttatgttcgtttcattagcaatgtatcgtttgagaaagcgtgaaggtaaagatctaccaattcctgcatttaaattacctttatatcctgtgttaccagcagttacatttgttttagtattgctagtattctggggattaggattcgaagcgaaattatacactttaatttggtttattgttggtatcattctatatttaagttatggacttagacattctaagaaaaatgacgtagctgaataccacccaccaaaataaaaatcaaaaaaatcatttcccatctgattaacatccagatgtggaaatgattttttattttatattaagataatcgctattaccaaccttgtccagatatgtcatattgatctaagttacctgcttccaaagcagtcagtgcatcttctatagtgtttaacgccgtgtctaattgctcatatgttatcaccaatggcggttggaatcgcaacacatttcctgctacagctataataactacgccatgctcaaagcagtaattacaaattttaagtgccgcactggcatcacgtgttttgaattttttgtcggaaacaatatcaataccaatgctcagacctttacctctaacatcgcctacactattgtatttagatacccattgatccattcgtttcctaacatattcccctttttccgcactagtctgaagaagcgactgatcttcaatcatttgaattgtggctaatgcagcttcacaactaactggattagcacctgttgtaaataaatgtgctggcgcttctaaacaattcataatctctttgcgtccaacaattgctgacataggcataccacctgctaaggattttccaaaagtgattaaatcaggcgtaaaattaaaatgcgagactgaactccatgtacctgttcgcccaaaaccttgttgaatatcatcgacagcgattaaaataccatgttcacgacaaatcttttctaacgcttcaaaataccctggaactggttctaaaagtccaccatcgccttgtatcgtttcaataacaatacatgctacttcgtcagcaggtacatatttcgcaaacatttcttttaagggtgctaaatattcttctactgaattagcttgcggctgctcgtacataccacgatatttatctggaaacggaatatgataaaaaccattcaataatggaccataatgtttgcgcatatttaaactaatagctgacatagacaacgagccaaaagttgaaccatgatatgcattagtgaaactaatgatataagggcgccctgtatatgctctggcaaatttaatgatgccatcatttgcgtctgatccggttaatccgaaagtcactcttttttcaaaatctccaggtgcaatctcacaaagcttcttagctaaacgtaccaacggttcatgatacatatatgctggtgtataatgaataaatttatcaacttgtgcctttatcgcttctgttacttctctaggtgcatgacctacgttttgagaactcgcactcgataacaaatcgatatatgtcttcccctcaatatcaaccaatgttgctccatatccatgatcaatcgctaacggataatatttaatacgtcctgatttcgcaaaataatgttcatcctcttgaattaattgatgtgctttactcatatacattcccctcccattgacagtattaatatgcaagcaaagtggcctctcttaaatcgattataaaatccgatttaaaatcctgctcaaataccgtcatgcctctatgaatactatccaatatactaataaaattcagatttgtaaatatattctgataattaagaattttatatcaatctactttgtttatgcgcataattttgttcgattagggaattgtttactatatttcatttgactctgaggtgatacgaatgcgtttaaaagtattgttccatttcattgctgctattttcatatcattcatgttgctatggatgaccatgttgtttgacttaataagcaatcaatcacatttaaaagctttattattgaatttagattttctaattccttctgacaatacaccatatattctagaaataatatgtcacttactaattggtagcgtcatttattttgtatttgtgttgctgtttcatacttctaaaaggctttactatctatgttatatccctttatttttcttatttatagcattgtatccctttttagtatttattgcgcaacgtccaatttttcaatttagtgtgacagaattaatcggttggattattacacatattttctttatgtcattaatagcgttagtcatacctagaataaaataatatttttaattaaactgacaattatttttcacattttatacacttttcaaggtttatgacttgagaaatgttctcatttttatcatactggaggtgtattgaaaagttaaggagtggaaagtatgaataaagagcaattagaaaaaatgaaaaatggaaaaggctttattgccgcattagaccaaagtggtggtagtacaccaaaagcacttaaagaatatggtgtaaacgaagatcaatatagcaatgaagacgaaatgttccaacttgttcacgatatgcgtacacgtgtggtaacttcaccttcattctcaccagataaaattttgggtgctattcttttcgaacaaacaatggatcgcgaagtagaaggcaaatacactgcagattacttagctgataaaggtgttgttccgttcttaaaagtagacaaaggtcttgctgaagagcaaaatggtgttcaattaatgaaaccaatcgacaacttagacagtttattagaccgtgcaaacgaacgtcacatttttggtacaaaaatgcgttctaacattttagaattaaatgagcaaggtatcaaagacgttgttgaacaacaatttgaagttgctaaacaaattattgctaaaggtttagttccaattatcgaaccagaagttaatattaatgcaaaagataaagctgaaattgaaaaagtattaaaagctgaacttaaaaaaggtttagatagcttaaatgctgatcaattagtaatgttgaaattaacaattcctactgaaccaaacttatacaaagagttagctgaacatcctaatgttgttcgtgtcgttgtattatcaggtggttacagcagagaaaaagcaaatgaattacttaaagataacgatgaacttatcgcaagtttctcacgtgcattagctagtgatttaagagctgatcaatctaaagaagaattcgataaagctttaggtgatgctgtagaatcaatttacgatgcttctgtaaacaaaaactaatttatgcattaaacgtattttttgatataaactactaaaaaggactcatacatgtgctttaatggcattgtgtatgagtcttttttgattaaagttgattttgccgtatgtattagattacgtaaaaaaatcggacagctgaaaaatctttaagatttctcagttgtccgattttaaatatagctattagaatttagttttcgtagtaacctaattctaagtcttttgaagtttgtttacggatttttctcattaatttttcgtcttcaattaatgattcaccgtatgatggaatcattttcttgattttaggtgcccattcagttttgtattcagggaagttacgttctaatacttctaacgcaactgaaactgaagttgaagcccctggtgattcacctaataatgcgattacagtgtggtcttgtgagttaaccacttctgtaccgaattggatgaatcctttaccgtgttcaggtgtatctttgataacttgtacacgtttaccagcagtgtataattgccaatcttcattacgtgcttctggatagaaagtacgtaagtggttcatacaaccttcttttgtcataatcacttggtcaaatgagtatttaattaaaggtaagtttttaactgctgctgctaataaagttgtaatgttgtatgttttaacagacttgaataaatctaagttagaaccatttttcaagaatttaggtccaacattagcaaatggtccaaataataatgttctttgaccatcaatgtaacgcgtatctaaatgaggtacagtcattggtggtgtaccaggtggctctttaccataaactttggcatcgtgttgttcaataacttgtgggtttgtacaagctaagaattgaccactgatagggaatccacctaaatgtttactttcagggatacctgttttttgtaataatggaattgctccaccgccagcaccgatgaatacatagtcagttacttgtttgaatttctcaccagttaggcgatttttaacagtaacttcccattgcccatttgataattgttcaaaatcaacaacttcatggttaaattgcactgtagcatttggatgtgcttcaatgcttttagccattttacgtgttaattcaccgaagtttacatctgtaccttcgtcaattttacttgccgccatgataccagggttatcttcacggcctttcatcatcaatggaatccattttttcattacttcgatgtcctcagtatattcgatattatcgaacatagggaaagctttcatcgcttcgtaacgatcttttaagaatttaacattgtttttacctctaacataactgatgtgtggtaatggattgataaattctcttgggttctcgatgctaccgcttttcactaagtgaccccagaattgttttgaaatctcaaactcttcgttaatcactttcgctttttcgatgtcgatagaaccatcaggttgtaaaactgtgtagttcaactcacataatgctgcatgacccgtaccagcattatttctttcgtttgaactttcgattgcaggacgatccaagcgttcgtaaacgtggatattccagtctggctcaatttcttttaacattgaaccaaatgttgtgctaagtacaccggctccaattaaaacgatgtctttactattagacttagccattggtttcacctctccaaaaattgtaaatgtgtatcatcaatatgaaagttacataaaactgacatatttctttaaaatatcaacgccatagataacttcctgttttaattgatacgctgtaacaaaatactatagttagtgcttacatgtatatgttaaagcaagcagtggtaaatgtaaattataattattcattaactttgcaatatattaaatcttttattcatagaagataaatatcaaatcgatcataattatttgacaacaaatagctaacgattgttttaatctacatttggattatagcattttaaacctatactctattttgatacaatataagtgtaaaatcaatcataaaaaggagattcaatatctgcatccaagaaaaacatcacaattacctttaatattgaaaactattttgaatctttcacttataggcattgtgattatcgtttttacacatgctgagtttaagtttaatgccggtgatagtaatgtgtttttattaacatgggatattcgaggtttaacatcttatattttctcattcttaatactggttgcgcttgtttctaaactaattttaatatttataactagacgacaaagaacatcataaataaacaagcagtccagtgcgtatcatcataccttacgcattggactgctttgctatgtttattgattgctatctttttgttgttgccatttttctatttcagaatctcgtagttcaacacgacgaattttacctgagtttgtttttggtaagtcgtcaacgaattcaatctctctcggatatttatatggtgcaacttcatttttaacaaattgttgtagttctttaactaacgtatcatcacccgcagtatggtcctgtaaaataacgaatgctttaacaatatttcctcgtatatcatgaggttttgctactacagcacattctttaacggctggatgattcgttaacgcatcttcaacttcaaaaggcccaatcgtatagcctgaactaataataatgtcatctcgacgtccttcaaaccagaaataaccatcatcatctacatgagctaagtcaccagtgatgtagtatttacctgtttgcgctttcgccgtacgttctggctctttataataccctttgaaaagtgctggcaaatcaagtggtactgcaatattccctttcgtattagcaggtacgctattcccctcatcatctactacagtgaccgaactacccggaatgcctttacccattgatccaatcctctgtggtgtatcttttaaaaagcctataagcaaggtactttcagtctggccatatccatctcttacagttaaattaaagtatttcttgaattgttcaactacttctcgatttagtggctcacctgcagaaacggcactatgtaaatgcgttaagtcataatcatttaagttctgtaatttagccatcatacgatattctgtcggtgtacaacataaaacattaatttgatatttttgaagcaattctaagtatgtttcaggactgaaccttccattaaatacaaaagcagttgcacctgaacctaatacagataagaaaggactccatacccatttttgccaacctggtgctgctgttgcccaaactaagtcatcttcattaatacataaccaatgttttggtgccatttgtaaatgtgcaaatccccatccatgacaatgtgtaacggctttaggattgccagttgtaccagatgtatatgacagaatcgccatatcatcacgcgtcgtatctgccatttctagtttgttacttgcgttttctttttcagcttcaagtgaaatccatccatctttttgaccggcaataacaaatttagttaacgcatcatattctttaattttttcaaattcaactgtgaatggctctagtgcaataactgcattaatttcaccatgtgtgatacggtattgtaaatctttagttcttagcatttcagaacatggaatgattgcaacacctaattttaaagcagcaatatataattcatacgtcgcaatagatcgtggcatcataatgagtactttatcgcctttagataaaccgtgcgatgctaaaacattacctactttattagactgttcaatgagctgttggtaagtgactgatatatcttcgccttcagtattatgatataaaattgcctttttatctggtatgtggctatatttttcgatttccgaaataatgttatatttttcaggcgcgaatagagctgacttttgcataactaacttcctttcatacatccacttttcctgtgatgaacattgtaattttataaatgaattatatatatcatacgcctatctttacagaattttcaattaaatagggttaaataccaaagtcctcgacactacactttgacatgacgtagcattcaaggactttcaaatgattgagggttgatatctcgggctagaccatatcagctaattcaatacgaatattgtatgataattcacgattaattatttttacatctgcacctttcgaagtgccacgatgcttgtgtgtatgcttgtactcagctgaattttgccaatgataaaatgcttgcctattttcccacagcgtaataatgatatagtgtctaccagctgttctaggtcttaaaaaccttaatgctttaaatccatcaacgttttttaaatgcttattacgtcgcaaaaatttttgctcgaatgtttcttcttgtccttcgttaatatataaatgatttaacacacataatgaatcatttgataaatcatttatcgcttctagcacatcgtaatatgcagtgtcattatttttttgtattgtgagacaatcatccagttcttctattacataacttctatattcatcataaatgttcataataaatgccttcatttcatttatatttttggtcatattactttatatctattactaattcattcccgtatttattaattacaatcatagtttggcttctttttaaaagataagactttgtaaaaagtattaatatttcatgcaaatggggacaggagtcgcccactatttttgtgtcttcaatttcatgatcattatttaacattagtcatgaaaatagccgacaacttcatctgtgaaatcaccggccttttattttagctaactttatttctgattttacgattttaattgatcatacagagaaagtgatctttttacaatttctaaaaactcatgatctatattggacatttgatgaaaataagacaaaatgttttctgttagcttctcttgttttgggaatgaatcatcttctttaatccaaatcgctaattcgcctaatggtgttttatcatctttaaatgtttgtatatattcgtaaaagctcatagtattccttctctcaatttacttatataaatcctaccacgaaagctttcaagaaaacacaattaaatgtctatttagtgaactttttaaggttgtgcactcttttaatgtctgccaattaggtcaattaatcatcacaatgtacaattaactctattttcagttcatatactcacacaccgtttttgaacaacacattaacttctcatttagataaaacgcaaaaaagcctggcaccaatacaatagatgccagactaagagtctactatataaatttatttagcgtatggttttacttcgattgcaccttcattttcatcatgaacaccatgcttataataatcaatatattgtggctctaaaggctttctgccacgtataatgtctgctgctttttcagctaacattaaaacaggtgcgtgtatattgccatttgtcgtacgtggcatagcggatgcatcaactacacgtaaattttccataccgtggactttcattgttaacgggtcaactactgccattggatctgaagcaggacccattttagcactacaagatgggtgtaatgctgtttcaccatctctacgaacccaatcaagaatttcttcgtctgtttgcacttctggtcctggtgaaatttctccaccattgaatggatccattgctttttgagataagatatttcttgctacacgaattgcttctacccattcttttttatcttcttctgttgataaataattaaagcggatacttggtttttcgaatggatctttagatttgattttcaagctaccacgagagtttgaatacattggtcctacgtgaacttgataaccatgtgcgaccgctgccttttgaccatcatatcttacagctattggtaagaaatggaacattaagttaggataatcaacttcgttatttgaacgtacaaatccgccaccttcaaaatggttagatgctgctgcacctgtacgtgtgaaaatccattgtaaaccaataaatggcatgcgcttgatatctaagcttggctgtaatgatacaggttccttacatttatgttgtatgtatacctctaagtgatcttcaaagttttcacccacaccaggtaaatgaacacgtggctcaatgccttttgattttaggaactctgaatcaccgataccagataattgcagtaattgtggcgtattgaatgccccaccagacaaaatgacttcattagcatcgatggtatgtaatttgccatttttcttatacgtaacaccagttgctcttctaccttcataatgaatttcagttacaaaggcacgtgtttcaacggttaagtttttacgcttcatagctggatgtaaatatgctcttgaagctgacattcggcgaccacgatgtacttgactatcgaacggtccaaaaccttcttgtctaaatccattcacatcaggtgttttatgatagcctgcttcaacacctgcatcaaagaatgactggaataaaggattcgttgctggccctcgttttaacttaattggtccatcatggcctctaaatttatcataaggcgctgcaccgtatgttttttctaattttttaaaatacggtaaacagtgcgcaaaatcccaagtttccataccttctggttctgcccagccttcatagtccattggattaccacgttggtaaatcatgccattaatcgaacttgatccacctaaaactttacctcgggcatgtgctactttacgaccgcccatatgtggttcttcatctgttgaataaatccaatcgtaaaatttattgcctgaagggaacattaacgcagcaggcatttggataaataaatcccaaaaataatcactgcgacccgcttctaatactaagacttctttatctttatcttcactcagacgattacctagtacagaacctgcactgcctcctccaatgatgacataatcatatgatttatttttgttactcatcgttatgacctccaaagtttgttgtatttcaaagtgagtattgcatgaaatatttgttagtggctgattggttatcgttgaattactaaacttagctaaccaaaacactcgcttttccttttacgattgttactaaaagtcatgaaataatctatgattcattttgcgtttagtccaaattatcaatcaacatttcgccacttatacaaaacaaagtgagtgtcttgtgttcttacaatggcactcaccttatctaatttttatttgctaaaccaattcactaattgtggatttgtatttgttaaaatgtgttttgaaacaaggtactcttctaagccttctttgcctaattctctaccgatacctgattgtttgtatccaccccatggcgcttgtgcaaaatatggatgaaaatcattaatccacaccgttccaagtttcaacttgttagcaacgcgttgtgcttttccaatatctttagaaaatacagcacctgctaaaccatatatagaatcattcgctaattgaatcgcttcttgttcagtttcaaagccttctacagtaacgacaggtccgaaaacctcttcttgtacaatacgcattgacgtatcacaatttgtaatgactgttggctcgaagaatagaccatcttttaaatcgtctctatctggacgtttaccaccaacagcaattgttgcgccttctgctttagctacatccatataagattcgatcttattacgatgttctgttgaaatcactggtcccatttcagtatcagcatcaaaaccattacctaatttgatttttttcacgcgatcaataagtgcttgctcaaatttgtctttaatactgttttgtactaatattcttgatcctgctgaacaaacttgacctgcatggaaatatccaccatttaacgcttggtctactgccaattcaaaatcagcatcatcaaagataatgtttggatttttaccgccaagttccaaggcaatattcgtaacattattagcagcatttttcataatatgcttaccagtctcaatgccacctgtaaatgatacaaggtcaacctctttatgacctgacattacgtcaccaacttcagaacctgcacctagaataagattaattgttcctttagggaaaccaacttcttccattaattcaaaaacacgtatcgttgttaatggtgtaatttcacttggtttcataactattgaacaacccgtagcaagcgctggcgcaattttccatgatgcttgtaataacggataattccaaggtgtaatttgtgtaactacacctactggttctttaacaattttgctttctgtatctggaattggtgaatcaatcatttcgccaccgtctttatctgctaatccagcaaaatacataaacacgttatgaatatcatccatatctgcatatgattcttctaacgtttttccagtatctaatgtttctaatcgtgctaacgcttcgcgatgttctttaatcttgtccgcgatggcacgtacttttttacctcttgtttcagcagtttcttgcgaccattcaccagactcaaacgcacgtcttgcagctaagattgcacgttctgcatcctcttttgtcccttcagaaaccgtaaatatcacttcttgattgtaaggattgataatatctcttgtatttttattcgcgctttcaacccactcaccatcaatatattgacgctgagataaatgttttaaaagttccattcaacaacctccgttaagtttgttaaatttttatttaacgaattttacaaacttatgttagcatagaaatgaaaaatgtgtcaatttacaaaacaactcaagaattaagttttgtaagttcgttagatttttatttaacgaaacatttaactttaatgctttaaatatttttaatgtctttttttagaaaaggttttataatgtattagtatttattttaacgtgaccaaaatgatgtacggaggtgcaatgatgactcgttctcagaacaaacagcaacaattagaacaagcaaaagatattgtaattaattcaattggacagacaatggatttgtatggcactaatagaagtgtaggaaacttatatggcactatggtgtttgaaggcagtatgacgcttgatgaaatgcgtcatcaattgcaaatgagcaaaccaagtatgagtgctggcgttaagaaattgcaggaatttgatattgttaaacaacaatttacgagaggaagccgcaaacaacattttatcgccgagaaagactttttcatctttttccgaaactttttcactaaaaaatttcagcgtgaaattgacatcaatgtcgaagcagtaaaagatgctcaagctattatcaatccattacttgaaagcagtgatttaactgaagctgaaacacaagaggcacaaaaaattaaagctcagcttgatcatacacatgtttattacgaatggttagaacagttaaccgaagcgattgaaagcggtgaaattttcaaatatttcccaattccagaacagccttctgattctgaaaattaaaattgactcaaacaacgacaatgatgattatgcatgataaaaacaatgcaataggtccacgaaataaacggtaatttctatctcaataaatagaaattaccgtttttgttttatatgacaatcaattatggaggtattttctagggctttcttagattcgttacattgcttcgccaatatatttcaattagctattctcgccctcacgtactctatcaataatattttgtatttgttcacgtttttcatattcattttctacaaaataaactaacggttcatctttgatagtaacccaaggtacaagtacatcaaaatctaattctttaaccatctctaaactttgaatagatttttctctatcacttgaacctaatataactgtacgccatctcttcccttcaaaacatataaaatctccagtaaataagtaacgatgatgaccatcatcccataaaaacagtgtcgtccctggtgtatgtccaggcgcgggaataacttctaaatccttatccaacattacacgattactaaattgtttttgaacagaaatcttatgtttcagtgcagccacatcattttcatgtataaagtaaggagcttcaacttgattagaacctcctatagattcatgatcatgattcatcaatacttttgaaacaccacctaatgatgcaaagtcttgttgggagtcacctaagtgttcggaatgatagataacaatattacctgtttcacgttttaaaataaaagatttaaatagaaatcgattatcaaaaggcagttccgaagtaggtgtcgcatataagttttttgtgatggattctaaactgtcatgtaatttggactgtttatttttaaattgattagtcattttatttcatccttcgattaatttgaattgtacatacgcaataccctttatttaatttaataatcaatgagagtctttcaaacttcgatttagaatatgcttcatacaataaataagtacttggagcactaaaaaattaaatcttttagtacaacattaatgaaaacctaaaagttcatcctacaatgctactaaaaaaaggggaatggaacagaaatgatattttcacaaaattcatttcgtcgtcccagacccgctttgaattataaattatcgtcttgttcttcttctgatacttgaacgattcgcaatgaacgacgttcaacttcttttaatttttcagcacgcgtttcaagtttaattctatcgcgccctaaaatgattaaaaatgatatcatcatgaaaataaaaataacaattaatggcacacttgccagtattgaagcagttttcaatacttctaatgcacgttcgccaccaactagcatcaatgaaaatggcaataagcacaatgcaaatgcccagaataaacgattggcacgtaatggttcgcctaccacttttttctgagatgctgccgctaaaatatatgaacccgaatcaaatgttgttgctaagaataagaaagcagatactaagaatagtacaatcatcaatgatgggaatggtaaatgatgcaccacttcaataatggttgcctctgtaccatgtgtatttaaatattgtgttacattaaactgtccagaaatttgtaaatacacagcatagttaccaaaaataccaaagaataatacgcatccaagcgttccataaataattgttcctagcacgacttctttaaggcgtcgaccttttgaaattctagcgataaataaaccgataaatggcgcatatactaaccaccatgaccagtagaatattgtccagtcttgtgggaaattcgtttcttttcgacctttaataccaccgaatggttctaaccatgttgccatatggaaaaaatctctcaacatatttccgaaccctgtcactgtcgtttccataataaaaacagtcggtccaataataaatataaaggctaaaagtacaaaggatagccaaacgttgatatcacttaacttttgaataccttttttcaatcctgtatatgaactaatggcaaatataaccgtgattgttaataaaatggccgaacgtaaaatcatatttttaccatctaaaccagttaatctttctatgcctgcagaaattaatggcacacctaacgctagtgatgttgccgcaccacctagcaatccaaagataaataagatatctacaactttacctacaaatttatctgtttgaccttttaaaatcggacgacaagcttgactaattttatacaccggttgttttttaacaaatactaaataaccaattggtaatgctggtaaaacgtaaatagcccaagcaattggcccccagtggaacataccatattgcgtcgcatattggagtgcttcatcactcatacttttcgcgccatttggtggaacttgatagtaaaaagcccattcaataacgccccagtataaaatatcagagcctatgcctgcacaaaacagcattgccgcccatgtaaatgtattaaattctggtttatcacttgctttaccaagtgtgacattaccatatttaccaaatgcgatatacattacaaagcaaaaaatcgccagccccataaataaatatatcgaaccaattgaatcagaaatggcactattaataccagtgatgatatcttcacttgcttttggaaaagccatcataggtataactgcaaaaagaagtacagctactgtccctataaaggtcgtccagtccataactttctcttttttcaattgtgctccccctaattattaattttatgaatcctgtttcgatttatctcaaaatgtaataattatattgattcacaaaattgacaataactaacatttaataataatgcaaatttcatacaatttaaaacttggcaattattgaatatttatataatttttcccgtaataaacaaaaccttaatagcgctaaaacaatagtgttaagttatgatttaacgaatttaacaaattttactaggacggcatttaagaatatttatacgttattaacgaatatttatttattgtaaaacgctaccaaaaagttagacttccttcccactaaaataccacttttctctttcaacttttttaaaaaacggatatgcaacttttagtattggtatcaaaatgattgttaggtcatattctatcaatatatttttctaaagaattgcttttattaactttcaattatgtacctaacctaaaaagaagccaaggcaacgaatgttaccttgacttctaatacatattcaactaactatatattcaatcatacgcgcatgcgagagtgattgttgtacatctataatgcgttgatttaaagaacctttatatggtaaatcaggtttgaataagtgttgtataaatagaccatctactaaaacgtcaatgtatgataataactctcgacgttctgcacaatcatttgctaaatattcatataaaaatccagtccatacccaaattgtctttttatttccaaaacgtgctcgaaatgctttgacaagatttaatgtaatatccaaattacaaaatggttcgccacctaatagacttagcccagatatataatcatgatcgcaatcatctaatatttctgctaatatttcatcagtgtatttctcgccatatctgaacttttgtgaggctttgttataacatccaacacaattaaatggacatcctgatacataaacactgcatcttactccttcaccgtcaacaaagctatttgattctattttagcaatataaccttgtccttgtttaatgtctaaaagtgtcattctttaggcgctttcatatgttttactcgtgcgcaaatttctttatgacggcctttaattactggacgttgaactggattgcctaagtaaccacatgttcgtttaacgacatcaactgttttaggattatcattgccacagttcgggcatttaaatcctttttcagttgcttcaaaatctccatcgtaatcacattcataacaatgatcaatcggaatatttgtacctaagtaaccaactttgtcataagagtagtcccataccgcttctagtgctttcaaattgtgttgcaatttcggatactcacaatagtgaatgaaaccaccactcgcataataaggataatctttttcaaaatctaacttttcaaaaggtgtaacatctttacgtacatcataatggaaagagttttgataatatcctttatctgtaatgtctttaatatctccaaatctctcttggtctaaacgacaaaaacgatccgttagcgattcactcggcgtactgtaaatactgaaccaaatgtcatataattctgtccatttcgtttgataacgtttcatttctttaagaatttcaagcgtaaatgcttttgcttcttgagatgtttcccagtctggaccatagaaaacagtagctgtttcatacaaccctatatagcccattgaaatcgttgcacgtttatttttaaataactcagcaacatcatctgtttcttttaatttatagttaaatgcgccacttttatataaaatcggtgcgttattcggtacagcatctttcaaacgatttatacgataaagtaatgcatcatgtaacacatcgatacgttcataaaagatttcccagaatttcgtcatattaccggcagattctaatgccattctaggtaaattaagtgtaacaacaccaagattacaacgaccattattttcaaaatgaccttccgcatctttccaacttggtaaaaatgaacgacaacccattggcgctttgaaatcacctaatatttctacgagtttgtcataatttaaaatatctggatacatacgtttcgttgaacactttaatgctagttgtttaatgtcatagttcggatcttgcggactaaagttggttccttttttaattgaaaatacaagttttgggaaaatcgctgtcgtgcggtcttttcctaagcctttgatacgagtatttaagatagcttgttgaattttgcgacttaaatgatctgtacctaagccgaatcctaatgttacaaaaggtgtctgtccattagatgtatataaggtattaatttcatattctagactttcaatcgcatcattgatgtctttagtgacttgttgatcaacataacgatcaatttcagattctttgacaaattgctttgcgatatttctatgttgttcttcattatgtcgtgcatatgtactaagtaattcgtcaacgcggtcaaccgtacagccaccatattgactgctggaaacattggctataatttgtacaagctgcgctgatgcagtttgtattgattttggtgaagttacattcgcgttgcctatttcaaatccattatgtagcatatttttagcatctattaaacaacagtttgttaacggttggaatggatgataatctaagtcgtgaaaatgtatgtcccctctttgatgtgcatctgcaacgtgctttggtaataaataatttaatgcgtaagatttagaaacgatacctgctgttaaatctctcattgttgaaaatgtatcactatctttgttggcattttcgttaacaatagcaggatctttagaaatcaaacccgttaatgcttcttcgatttgattcattttaccccttcttcctatatattgtgtctactcattacgttataccactatatatagtattttcaaatttttattagtctgttaactaaaacgtcacaaagttattaacatttagtgaaattcatatttctacacaattatttcattaatttttaaaattgttctcgaatcgttctgtcatttcgacatgtttatgcaactattatttcattttgcaccgggactatagtttctatttttcatacttaaatcgtcacaatgcccatcaacattgcaattactaacataacgatggcgaatccccaaatccaaaagaatgcatacttaatatacgtgcccatgtttgcctctgctaaaccaattgccaaccataaggctggtgaaaacggactgacaaatgtacctataatattccctataaccattgaataagctgttgatacagacggtacaccaaattgccctgctgtttgttcgacgatcggtaacacagcaaaataataagcgtctgtgctagttagtaaatctaatggtacgccaagtaaacctacaataatatgcaagtatggtcctacttctgcaggaatcactttgattaaattcgtcgcaatcgctttaagcataccggtttcatttagtacacctaaaaacatacctgctgcaataatcactgcagccatcattaatgcattcggcgcatgcgctcttaatcgctccatttgttcatccactgatttaaaattaataacgagcgccaatgagacacctatcatgaatgcaaattcaggtggcgcaatatttattaacatcgatagaataacagctaaagttaaagctgtattcacccattttatccatgattttgttcttgcacgtccttttacaggaaaccttacatcttgatctcgttcatatacttcaactaatttatgtacatctatatcttgtgtttgcggtaattcatttctctctattgcttttttgatacgtttctgttctttaaatccaagatataccgcaaacaacataataagaatgaatcctattatttgaataggaattaatccataccataattcattgacacttttggcttttaacactgcagctacacgtgccattggacctccccaaggtaccatgttcataatcgccgcgcttaatgctaatagtaaaatcaataaatatttattcatatttaacgctttatataaaggtaataatgcaggaatagaaagcaaaaatgttaccgcaccggccccatctaattgggctattgtgccaattaaagctgtcattgcacagacaatgacgacattgcctcgtgtcattattattaagcgtttgacaagcggcttgaataaaccactatcgttcatgatgccaaagaaaataatagcaaagataaacataataacaacgttgatgacttgatctaaccctttagcaaaaaatccaaccaaatctgtcacactatatcctaaaatcattgcacctaagcaaggtatgattgtcataccaacaactggatttatctttttggcaatgagtaaacctacaattgaaataataataatgagccccattactgttaaccacatattatcactattcatattattttctccctccacttttaatacaatttacataatccccctctttaacttaaatattataattaatataattttttatatttaagttatctcattttatcaaaaaaatcttttttgcgtaatagttaattcggttatctaatttttatgcagtatctctaatgactatttgaatccaattgattaatttgaatcttttcataagtatcatttttaatagcaatggttgaattctcggttctattacacaaaaaaactggctaaaattagctattattcatagcaacttcaaccagtttttctaataacctatatatttattaagatttttcaaatcgtctatttctctatgttagaaatcatcttacatatgtttatcatcttcgcttagaaattattagtatgcatcccatcttcatttacaaacagacatgttattacttcaagactgcctttagacggcacacagttattattttttatccaaccacgctaaaaattgagcttgtttagtatcgtttataaattctttcgtcactatttgtgataacaattgctgcttttcgctgtgattcatatcaagtaactttattttctgtcggcaagtatataaaaagtcgatatacgaactgtatgatggtggatataacgcctcaagctctgccataattgattttgtcaacttaggactcgcaccatcagttgatacactgatagttagcttgtcgcggtgtagtgcacttggaaatacaacattgccatttgatgcatctccaacattattaaaaagggcatgctcaggtaaggcttgttttaccgcttcattgacacgtggctcattggttgctgcaataactagatacgcgtctacaatatcgcttggttcaaactctttttctttccatatgacgacacctttatctaccatattttgaagtttttcagtgatttcaggactgataaccattatgtgttcaacgtattgacttaatgtttgtgcccgacgacttgcaacgaggcctccaccaactatgacgacatttttatttgttaaatctatcattaatggcatattcatgttgagcaacatcctttatatctttttacgtcatttcatcttaaaacatttaacaccaatcgctaataaacatcacgttgatagcgttgttgctgtttcatttgacgcaatatcgtctccgcttcttcttgagaaatatgacgttcttttaccaatacatctttaatggcttgatggacatctttcgccatacatttttcatcaccacaaatatagattgctgcgccttgctcaatccattcattgaaacgttcactttcttccattatacgatgctgtacatattctttgtgttcttggtctcttgaaaatgctaaatctacgcgtgttaagtttccattttcaagccattcttctatttcttcttcatataaaaagtcagaactacggtgttgatcgccaaagaacaaccatgttttcccagtcataccaagttcttcacgttcttgtaaatatgctctaaaaggagcaattccagtacctggtccaatcataataaccggtatatcttgcttcatcggaaatttgaagttcggatttttcttcaaataaattggtactatatcgcctggtttaattcgctcagcaaaatgaaccgagcatacaccttttctctcacgtccatgtgcttgataacgaaccgtaccaacggtaatatgcacttcatctggcgttgccataaaactactagaaatcgaatactctcttggtggtaattttctaaggatttgatacatattctcaggttgtaattctatagttggaaaatctgttattaaatctataaagtcccgatttataacatattcacgcgcccatgactcatcttgaatacgttcagataattcttcattgtcaaaatagatatctgcatttttcaataatggcaatgttaatttagtaaattcaaaatgtgatgttagtgcttcaacaataggaactgtatcaccatgatcattaattggcaccggagattgcggatcccaacctaacatggatattagtttttcaaccaattcagggtcgttttgcggtaatgctactatacaatctcctggttcatatgattcactaaaatcatcaagtaaaaattctatatgtcgtgtttctttatttgaatcggtaccatttaaattgatattcgctaaaacttctgcttggtatggatttaatttagaatatttcttttctttggcagacttaattgattcacttatcaccgattcactttgaataccttctgatgtagtatcaatcatattaatgatgtctgccatccacttttctgcgtcttcttcataatcaatatcacaatctacacgcttacatatacgctcagcgcctagattttctagtaaagcatctacatctttaccagcttgacagaaaaattcatatgtttgatcacctaaagctagtactgaatatctcacatgatttaaattaggtgcgttatcgtcttctaaaaattcaaagaaatcccatgcattatcaggcggttctccttcaccatgagtagacgtaataataaataaatcttctaactgcgcgatgtttgtcgtatcatattcatccattgacatcaaaacaacttgatgtccgatatcacttaaacgttctgaaaaaatttcagctaaacgcatggcattacctgattcagaaccatatagcactgtaacatgccgctgattagcttcgatatgtggctctttattttgtaacatatacgttgttgaagttgcttgttcttctgatatttgtgattgttgccacacttctgtctctaattgttgttgattactatcacttgtcgtatcgttactattagctagtaaaaaaccactaagccactgttgttggctctctgttaatgtttgcagcagattgttaatctctgtgacttgtttttctgtaaatggactattagatgtatttaatttcaaatgttttcacctcaataaacttgaaatagatgattgactcttttttttatcgatagtttagtcaattttttaatatgtatggtataaattaaaacaaacttgagttgtgtctgatagttatacttgcaaatatttacaactttcatgttgcttgaatgacattatcagtaattcagacaaaactttgattatgtcgtgtcagttattaatgcatacagtaatgcatcgttgttattttttatttatttactatttattatgtaccaaatcagcctttcagtaaaataggtcaaattactgattttctaaatataaaatgcctcctaatgacatactattagtacatcattaagaggctcttgtgttatttgcatactaagcgctcaattttaaatttaagatgaagattcttgcaataatatttctatatttgtcgatatatccaatggatcttccattggcaagaatcgatttacaacattgccttgtcgatcgattataaattttgtgaaattccattttattggggacccaaagattcctggttgttcattctttaaatgcgtaaataacggatgttcatcgttcccgttcacagatattttagctagcactggaaatgtaacaccaaatttctcacgactaattttcaagatttcttcattagaacctggttgtcgattgtcaaaattattattcggaaaactcaacactacaaacccacgatccttatatttttgaaacaaagtctctagttttttcaattgttcgctatatatacattctgttgcagtattaacaactaaaatcactttacctctaaatgcttctaatttataagttaagcctttataatcacttacttcgatatcatacacatttctattattcataagacacccctacacagccttttttatattgaatatgttctttttagaatgttctgataaaataagtgcgcgtttacaccgcgaacatacattatatagcgtgatacatttttcgagcacacgataaataatgttcgagtttatgttgttgctcaacctatccgatttaccgtcttttttcacctgtcttactttattaaaataatcacattgtatagctgtattagtccagctacaatatctttcgttataacccctcattataatcatccttattttctatttttaaaaagacaattagaccgctctttaaactatagattaatacttaagttaaactcatacatactgataccatacgttagatctaacaatttaaaattcgttataactatggattaaagagctgcccaactcatataatccttaaaaacttcacatgtgattgtttattaagccctcctttatcttattaaatatccttataacccttttaaaattaaactgacacactcatacattgttacacgcgacgataaacgtcatattattgcatatcattaaaacaagtcactttgtatcgtgtgcgaccgaatacatattaaatcatcaataatgattattcaattattaaaaataaaaacgaacattctatatagagtttctacttattgttttttcatcattgtctacattacttaacattcgtgtttataagtaatattgaccgccaatatttagacactttataagtatgccattcatcatttttaatcatattatttttcttattgatatttctattcatatatttctgattgtatatttagatataataatttgttattggaaaatatatgaaacaaatttgactcatctttttcaatatctaaatgacacgatgcatgatttttgaattttgtaattaacttccttttaaattagactgaattatgacaattttcaaacattttaatgtgtaaatcattggcaaaatatacgaattgcatttaaatcgtcaatttacatatatttttgcgtagtaatcaatcgttatcattgttatttatcgttacattatttcgagtatcagtatgtatttcgggcttcgtttgataacgacatttctttgtgacatcgcttcatcagtgtaacaacaaatacaatgatttcgtgatgttagttacccattttatgtgttgcataaaatatgttgttataaaacattttaaatcattttatataaacaatctatatatttttggcatttccaaaatatcacttgttatattaaaaaccgacaagacattttatcttatcggttgaaatttgttattgttatttgtaatgtttttaggtttctttttaatataatatatttcagtgaaaatacatgattgattgtgatttcactgaaacatggttaattgcgttgttgatgaataactttagcataaatataggaagttattttgtacatcgccatatatagaaacgaaattataatgacagctagtacgtaacttgttaaaaatatatgatggttattaatacctatcatatttagtaacgtatatacaatgttactagaaattaatgtgtgaatcagtgctactgttattggtattgcgaacaagaaagtcatttgatttcgtgttatctttgctattcttccattatctaaaccaagttttttcataatgtcataattgtgctgatttgcataggcttctgaaacttgtttatagtacatcattagaaatattccaatgacaagtacaattgatactacgccacctacaaatattagtccacctgtcaaacgatcccaaaccattagcatttctgatttagaatttattgacgcatcgtattttttcgatagcttttgtatttgtgatgttgttaatttcgtctttccaaatacattaaagtttatcgatattgtcgaattcttttgttcatgtgcataaaatccttttactttttgtaattgattgttatctttaacaattaaaaccatactatcttgaatcatcatcaaatttaacgcatgtgcgtcaagttgtttcactttaaagacttcattattaagaccgaccttagactgctttttaaaaataggtacattcgtaatcatacctatactttgattgtctaagtgtaatttgttttggtgatatcgattataatcttgtgcagtaaaagctgtaatcattactgattgtcttgaaaatatcgcgccttcattaccaatgaagtctattggaatatcatcactagcctgttttaacttgtaataagcacgattcttttctaaagaagctctaaataatgtcgtttcatatactttgaagtcttttgcattaaccgaaccctgtatatcacgtttaatattctcaattgtttgttgacgttctatttgtgacttagaattgtcgctaaatgacaaatcataatcattcgtaatcaatttcgtaatggtatgattcatatcacgataggttgttaatgtcattgtgagcgttacaatcaaaaatgtacacagcaaagtgattgttgcaagactgactgcattcattttaagacgtacacgcatcccaactaccacaaaaaaataccgtggatgatagtaaacttttgatacctgctgcaatatactaataattatttcacttatacctacaaaaaatgcataagtaccgataataactaatcctatgacaatccatattttaaaaaaggcaccaaacgtcgtatcttgttgtaatgcaataaagtaacctaaatatagtgctgcgcttcctataacaattaaaacgtaacgcaaccatcgtgatatgacactagaatcggaacgatgttgataagttatcggccgttgaaaattaatactgaacaagttgaatataagtagcatgcccattaatacagcaatgataatcaaagtaataaacatcgctacagagtcaaatggataataccttaacgtcgcaacttcactgcccattattttctgtataaacaagaaaaatatcgcaccaagtaagtatccgccggcaatactaacgactgaaattatcacaaattgtaagatagtttccatcactacaattaaacgcatacttttcttggtcatgcccaatgtcataaaaatgctaaactcttttcgtctttgtgacatcataaagtgatttgcatagaaaataaaaataaaagttaaaagcgccataaaaaaattagctatgataataaatggtactaggaagtcattcttctgttttatgtagctatttaacccaattgacacaagcgtatattcaatcatgaatagtacacttaccgctaaaatgaatggaatgattacaagtcgctgcgtaataaattgacgtcgcactatgtgccataacaatcttaacttcatatattgacacttcctccattcacaagtgctaagctatctgttattcgttgttgaaaagctaattgactttcttcgccacgatatatttcatgatatagacgcccatctttaataaaaattactcgctctgcataagacgcatcgatatttgaatgagttaccattaaaattgtctgttccaattgatgaatctcttgaaataacatcatcaatgcctttgatgtttttgaatcaagtgcacctgtaggttcatcggctagtaaaatcgtcggtttagtaactaatgcacgtgcaatggcaatgcgttgcttctgaccccccgagatttcagaaggatacttgtttaagaatccctctaaatgtaattgtactgccaactgatgtaccctttgttctatatcttttcgtttagcaccagctaaaattaatggcatcattatattttctttattcgtcattgttggtaaaagattaaaatcttgaaaaacaaaacctaccatttgttgacgatacagtgctttacttttatttttcatattatttaaatgtgcgccatccacaataatgtcaccttcagttagtccatcaaaagaagcaattaaatttagtagtgtagacttccctgacccagactcacccataattgcaacaaattcaccagctccaactgataaattcatttgattaagtgctgtcgtagcattcaaacctttaccataaaccttttttacatgtttcacttctagcaacatggcatgcacctcatttctttgttagtatctatattaaaacaaaaaaatactaataacatttaaattagtaaaaaaatgttactagtatacttacaatattgaaagtttttattcatctggaaattgaatcgtaaatgttgtaccctcattttgtttagatacgactgaaacaggatggtttgtgtgtgttgaaatttgttttacgataaataaaccaatcccacttgagttactttggcgctggccattataacctgaatagcccttatcaaatattttaggcaagtccgcttcactaataccgataccattatcttttacgtataattgattggattgctcatcaaattcaatccatatatctttacctctcgcatacttaagtgcattatttattaattgttctatcattaaagaggtccatctaacgtcagttaatacttcgtgatgacaaggttcataatggatttttgttttttgatcaataaactgtattgaatatttcataataattgggcgaatgatattattaatcgaaattttagtgacagaaatatcagaagtttcatttaataactttaaataactaagtgctaaacttgtatagttatcaatttgaataacctcttgacgaacacgattcacaacattaggctcatctctttcaagtaacagttgtgctgcagtaatgggtgttttcatttgatgtacccatgttaaaaagtagctctctacatcatttttatattcaatttgttcatttttaagctgatacaacgcattttctaagttttcaatttgttgttgttggcttatagtttttacaaaacttaaatatttaatacctatgaatatgagtaataataataaaataacgccaagtgctagtaaatatgcttctaatggcaaatgatacaggtaaaacattaagccaaataaagcaaaaataactatgactattgctatttcctgagtaatacttttaagaaaggtcattacattcaccctatactttatatccgacatttttctttgtaatgataaaatcattaacgccaatagtatttaattttttacgcaggcgcgtcatgttaacagctaatgtgttatcatctatgaagttttctgattcccaacatttttcaattaaagcagttctacttacatatttatcttcattttgaaataataactttaatatttgtaattcagtcaaagatagctgtatgctttgttcttgatacacgacttttgcttcatctaatattaatgtacaacctttaaccgtcaatgaatcattagctactgacaagtcataagttcgtctcaataatgcttgaattttggcaatcgttaatgacaagttaaatggtttttcgataaaatcatctccccccatttgtattgccataatttggtccatattatcaatacgggaactaataaatataattggcacattagatgtttttcggatttcttgacaccaatgaaaaccatttaacgttggcaaattaatatctagcaatacaagctgaggttgatgttggttaaagatagacagtatatcatcaaattgttcaacgacaataacaccgtaattccattttttaagttcagatgctaaactttctgctataacaaaatcatcttcaacaattaatattttcatctataatcttcttccttcaattgaattatcctttgttatctttttgttctttagcctgctgcaatgacggctcttgatttgaactttccgtgtcatttgtattttgatttagtgtatttgctttttctttctcgagttgctttttcttcgtacgtttacgctcttctaaaatagacaacactataaagaatatgattaataatggagataacattactagtatcatttttccacctcaaattatatttaattctatattttcacacgcttctattctaacgctttctataacaaattgtcatatatattcattttttgttattctaaatcactctgtttacatatttttaactaaaactacataattgctcaaaattcctcttttacactgaagacatagtcatatactcaggaggatgtcttatgttatcagttaaaaaagccacaaaatttgcagttgctaaccttattatcgtgtcaacagttttcagttctgtcacacctgcaattgcgcaatccgataaaagttctaaagatgaaagtttcgcggttggtaatactaaaaatccaaaaaatgttatctttttagttggcgatggcatgggtccatcatttaacacagcttatcgttattataaaaatgattcgcataccaaagaaatgacccctactgcttttgattcatatttaaaaggcacaaatcgtacatattcaaatgacccaaaacagaatattactgattctgcagctggcggaacagcctttagttctggccataagacatataatggtgccatcggtgttgacagtaacaagcagaaagtaaagacagtgcttgaacgtgcaaaagaaaaaggtaagtcgactggtcttgtttcaacagctgaattaacagatgcaacaccagcagcatatgctgcacacgtgacttctagagatgataaaaacgaaatcgctaaacaattttataaagataaaatcaacggaaagcataaagttgatgttttattaggcggtggcgctaaatatttcggtaaaagtaatggcaatttagataaaaaattcaaaaaagatggttacgaccttgccacgaacagtaaggagttatcaaaatctgataaagataaagttcttggtttgtttgcagataaaaatatgccacttgcaatagatgcttctaaagacgaaccatcattagctgatatgcaacaaagtgcacttagtaagcttgagcgtaataaaaaaggtttctttttaatggtcgaaggtgcttctatagataaatcagcgcattccaacgatattacaggcgttatgtctgaaatggaaggttttgaaaaagcattcgatgacgccattcaatatgctaagaaacataaagatacacttgtcgttgcaacagcagatcactctactggtggtctaacaattggtaaagataaaggatacgaatggaatcctcaaccgattaaatctatgaaacactctggatcatatatgacagaaaaaattgctaaaggtgaagaccctgaaaaagttattaatgaaggttatggatttgaattttcacaagatgatatgaaaaaggttaaaaaagagaataaaaagctaaaaagactacttaaaaaagaaaaagacgaaaaatccgcagaagtagaaacgcaaacaaaagccctacaacacgctattcagaagccagtaaatgataaatcttatacagggtggacttccgatggacatacaggcgaggatgttaatacctacgcttacggacctagatcagaatcatttagtggtaatatcgaaaatacagaaagcgcaaaaataatatttgatatattcaagtaaagcataaaaaaattcccgagcactataacaaggtgttcgggaattttttatggtttaatttagtactcaatgttaggtgcttggttaacacgttcttggtattttttaaatgcgaagtataaaccgccaactaatgttaaaataactgctaattttttcatcattcaaactcctttctaagatgtgttgaaactgagttcaattaaattatatgtttttattatacactttttgacatattttttaaatttaagaatgcgaagatttttaacatttctgatgctagctttctttttcatctttcaaatgcttaataaaatcaaagccaggtcgccctttagccaatgcttccatcacatcataccaatccgaaccgacttgttgatatatattttgcaataattcatcttgcgccttgttcaattcagcaatgagttgatcgcctttatccgtcgaatataattttttgacacgtcgatcagtctctaaaactttttcaataatgagaccttgctcttttaatttttgaagtgttgcatgtgatccttgtttagaaatttctaatatttctagtaatgatttaatagtaataccaggtaatttattgataaaaaacaaaaaacgatgatgctgacgactcataccatacttctctataatttcatcagcggtagtaataaaggttttatatgcaaaataaaacaacatatgctcataatcgtttttattggtcgacatgatgatgactcctttcaaagcgttaacctcattataataaaatttataatgtaagtcatacaaatgatgataaaactataagctaaatctaagtttcacgagaaacatttttgtgtatcagcaaattgcgccaatcatattaatacaaatttaatttaaacacttagaaatgttagtcgtgcgtaaatagtttgtatctctcactctgtgtatttaatgcaaccacatattttccaggaaataattaatcattcaccatccatgttatagcaagcttaatcgcttggtcccaatatgcataatcatgatctcctggtccatcttcaaattgataaggaacatttttgcgtgataaataatcgataaaatctaagttgtcttgatataaaaagtcttgtttaccacacataatgagcaattttggaatttgtttatcttcagctacagctttgtctagcaagtaatacggatcatgttcagttcctttaacacttgaaagattgccaattatggcctcttttgaaaaatcattccactctagatccattaaattttgcgcttcaaacacagcagataatggtacagctttggcaaatttatccccttgtgttaatgcaaatttaattgtgccatatcctcccatagagtgacctgctataaaattgtcatcacgctttttggaaagtggaaatatttgatgaacataatcatacacttccaaaatataatcataatagctatgaccatatgccatgttagcatatgcgctatgatccacattgggcataatcacagctaatttgtgttcattcgcatacctttctatgcttgtatatctcatatatgtcgtttcatcacttgataatccatgtaacaacattaaagtttttaatggtttagcagttgtatcgttattaaagaagctttgatcttccggtaaaatgactgtcaaattttgatgcataccaattgttggtgaatgatagtttaatgaaatataagccatacgtcatgacccctttctaattctactttatcaacattttacgcttaaacaattcactttaaaatcattttcaacaaaaaaaccgaatacaaatgtattcggcctaaaaaagtatttacgctttttctttatgatcttgcttgcgttttctaaacaatagtaatgatcctaataatgccatcattgcaccaaataaagttgcatttgtgttttcgctcttatctcctgtttctggtaaagcatcagttttgtgttgttttgataccttattagaatggtttacttcacctttaggatttgatggtgctttctgttcattatttggtggtgtaactcttgaatcggagtcgctatctgagtccgaatcgctatctgaatctgagtcactgtctgattctgaatcgctgtctgaatctgaatcactgtctgagtctgaatcgctatctgagtctgagtcgctgtctgagtctgaatcgctgtctgagtctgaatcgctatctgaatctgagtcgctatctgagtctgagtcgctgtctgattctgagtcgctatctgagtctgaatcgctgtctgagtctgaatcgctatctgagtctgagtctgaatcgctgtctgagtctgaatcgctgtctgagtctgaatcgctatctgaatctgagtcgctgtctgagtctgagtcgctatctgagtctgagtcgctgtctgattctgagtcgctatctgaatctgagtcgctgtctgagtctgaatcgttgtctgaatccgaatcgctatctgagtccgagtcactgtctgaatctgactcactatctgaatctgagtcgctatctgattctgaatcgctatctgaatctgagtcactgtctgaatccgaatcgctatctgattctgagtcgctgtctgaatctgaatcactgtctgaatccgaatcgctatctgattctgagtcgctatctgaacctgagtcgctgtctgagcctgagtcactgtctgaatccgaatccggatccgggtctgggcttggttccggttctgggtctggacttggttctgggtcaaccggcggccctggagttgggtctttcggatttactgctgaatcaccatcagcacttccaccaccataacgtacaacattctcattattccaaccgaaaatactgtagtctctatttgttacaggatcaacattttcttgaataacctgagtttttaagttcttacctgtattgtcgtaatgcccttctactaatactacatatgttttagtaatatcaccaaatttaatactagctacatttggatgctcataatagattctatttttaaattggtctgttacttctttaaggttagagtcatttggatctgcatagtagctatctgataatttagatgtatcattcacttcaaaaattctcagttttgtatctgtagcacttactttaccgctactttcttcgattttatcttggtaacctttaatatacacccacgtattacctaaaactcgttgcttagggttaacaaataccgtttgcttgtatgtgttttgacctgaagctgtatctacaccaataatttgagaagaaatgttcgcgccatttggcttatcaattcctgcaattggtgaactatagttataagtaattttattattaaacatttcatccgcaatattaatatttgcatcatatgttcctgatttaggtgcctttgctcggtctgtaaataaaggtaatgaaaattgtccgttaatattttctttttcatttacataatctgtaaagacaaatgtatacgtcttagtcaagatatcatatgttgctttagctacaacatcgccattcgtacttttaatatctgcaattggcatcgtattatttgaattagagtaatccacgtctccattaccagttaaactatctggtaacttcgctgtaaaataatctcctgatttcactttatctgtcactgtaaaatttgccgccataaatgtgttaccactttggttagggtcaaacgtagtcttttgcaactgtagattacttgccgtaactttatcatttacatttgtacctttagcatcagcagcatttactaccggttcagcaacagctaaactacgtacagctctcgttctaacactcggtttactagttccttgcgcattggaaatcgtttgtggtgatgattgtggtaaatctaatgtttgaggatttttaagctcactgtttgttgctatgctattagcatcattcgttgttttattatctacttgagaatttgcttcttgaggaacagtttgatcttgcatttttgcagcagttgcttgatctttaattgccgtaggttgaggtgtttcatttgttgaagctggctctgttgtagtggtattgctcgtttgtgtagacattggttttgctgtgctatctacattcgcactgtttgtgtttgcactaatatcagatgtatcattagccgttgtatttaattgaggtgtttctatcatattgtttttttcggaatctgcacttgcattatttttcgaagattgcgttgtatcgttcgattgttctgaagcttgtgcttgatgattgcctatcccaaatagtatagttgcccctactattactgatgtggtacctactgtaaaacgtctaatcgaatacttattctgcttattcgacaaataatcaattctttttttcaaaaatattactccatttcaatttctagattagtctaaattgtataatgaaataagaattatatcaattgctttttgaaaaaaattacgtaaaatttgttttcttcctatttatataacttaaaattttctgttaactagcaaaaatcaatataccatttttacactattgcaaatgttttacttttcaaaaacttagaagttctaaatttttcatcaccttaaattttactgtaatttcaacaatcaaatttaactaacattttaaattattcatcatgctagcaaaaaaggcctaacgtataaatgtacgttagacctcatgttcaacttattcattttacattgtatattaaacacatacatcattgaataaatgtttgcttactaaccaatttttatgatctttaacaacaagtttttcatctttaagttcatgaataatatgaccagctgtttcccgggaaattccagccatatcactcatgagttgaatagttaaaaactgtttgatttcataaaattcatcttgatcgtaccctactgtctgacatatatgacataacaatttaataattcgatctttagcaaatttacttgttaatgccatgttatagttcatgtgttgctgctcattatcatttattaatgcaaaaagtgtcaaaaatatatcatcattagctttgcacaaaaaggccatcaattctctaggcaatccaagaactgtacaatcggttaatgctgtacacaattcattaacctctttcggatgaaataagttactgattggaaataatacttgctctttattaaaataacgatatacatctccattttgattgtaatgttctctaataatgttaccttcaattaaaaagtaaatattgctactttcttgtggcgaaaaataaataacttggcctttcgtataatgtctgacaaaacattcactttgatatggttgtaatatactatatgggatattaatgtaatctgctaatgcctttagttcatgttctaatttattatttctacccaaaataaagttttctgtcataagttaaactccttcaaaccttgcaaagtgtcagcagacaactttttcatttgaatcaacggagaaacatatttaatgttttgtcgcgtgataaagtgctacatgtgaatgtgtgtacctttattaccaatcaaagcttcgtatgcctgctctaaattggtaatgataacttttttgttttccccactttcaacaaatcgtatcgcagcttctatttttggcaacatcgatccttccgcaaacttaccttgtgccgcgtattttttcagtgttgctacatcaatatcatcgatttgttgttgattaggttcattaaagttaataaatacattttctacattcgtaagaatcattaaggtatctgcttcaatcagcgttgctaatttctcactagcaaaatctttatctataaccgcttcaacaccttcataggtattttctttttttataactggaataccgccaccaccgcatgcaatgacaatatttttaccgtctgctaaagttcgaattaactggtgttctagtatagattgaggtagtggtgacgcaactacttttctataaccacgtcctgcatcttctttaaagactgagtctggctgttctttttgtaattcttcaacttcttctttcgtataaaaaggaccaattggtttggttgggttattgaatcgtggatcatctttatctacttccacacgtgtaacgattgtgcctacagttctatcactattcatttcagttaaaatgcgattgatttcagtttccaaccaatagcctatcataccctgtgacattgcaccacaagtatccaatggcattgccggcgttgtgtcactgttcgatttagcttgttggattaataaacttccaatttgtgggccattaccatgtgaaatgacaatacgcgctggtgaatcaaataaaggtttaaggttttgcatcgcacgtctaatagctgtttgttgtgcttcagcagttgcttcttttgtctgtatcgcattaccgcctaatgcaatgacaattttctctttcatatttttgtcgctccttttaaaaaacatttatcgttcccatcaataacttaattaatccgataactgcaagtacgataataatcataaaaagaatatagtctgatttaatcaaacgtgtctgattattcttttgaacgattgaataaacaagaagagctggaatataaagtaacatcgtcaataataagtaattgatacctgctgcatatataagccatatagcataaattgaggctatgatgccaatcgtccattgtttagtagttgcttgctgtcgatgctctaaagtgtatttaacttggtaaaatgcactgaacatgtaagggtataaaatagcacttgatgctagtgaaaatgcaaattgatacgcactctgtgtaaatagcatacttattaaaaataattgtactaatatattggtaataagcagtgcatttacaggtgctccatttttattttctttagcaaaccaccttggaaataatccatcttttgcaacaatgaaaggtaattcaccagcaagcaatgtccatcctaaccatgcacctagtaccgaaataattaaaccaatatttacaagtgtagatccccaaccacctacaatagttgcaagcacctgtgccatacttggcgaatctaattgagaaatatgattttgcaaaatcacgccttgagctaatacagttaataagaaatagataattaaaactgatataagtcctataaccgtggcactacctacatcttttttatttttagctctactagaaaaaattactgcaccttcgataccgataaacacccaaactgtcactagcatcgtacttttaacttggctcattgtgctcgcccaactaaatggcaatacaccctctgacgtcataccgaaaaagcctgttttaaaagtgtcaaaattgaatgcaattatcatgcatatgattacaagtaaaatcgggattaactttgcaacagtaacaatactattgataaatgctgctgtttcaacgccttttaaaatcaagaaatggacaccccagagtagtaacgaggcgacaataatacttggtaatgtgttgcctcctttaaaaatcgggaaaaagttacctactgctgacatcaatagtgttgcataggcaacattgcctaaaaacgctgagaaccaatatccccaagcactgataaatcctacaaaatcgccaaatcctgcttgagcataactataaataccaccgtctagctccggccgttcattggttaaattttgaaatacgaacgctaatgaaatcattcctatagctgtaataatccaaccaataataatggctaatccaccggctttaccgcccatatcagacattatattgaacgcaccgccaccaatcatggatcctataactagtccaattaaagaagatttactgagtttgttatctcctgattcgttcatattcatttctcctttaataccaatatgaggtgtctgtacatgacacttatatcatcagacacatcatattcatatcgttccatttagtgattaactccccaatgttgctgccattactgccttaattgtatgcattctattttcagcttgatcaaacacttttgaatgttcacttctaaagatttggtctgtaacttccatttcagctaatccatatttttcataagtttcttgtccataaagtgtatttgtatcatggaatgctggtaaacaatgtaagaatatcgttgaatctttacctgttaaatcaaacatctgttgattcacttgatagtcttttaataaattaatacgttgttcaaattcactttcttcacccatcgatacccaaacatctgtatatatagcatctgtattttcaactgcttctgcaatattatccgtaatcatgactgaaccaccatattgactcgctttttcttttgcaatatcaacatatgcctcttttggatttaatgatttaggtgtacaaattcttacattaacacctaacatagcacctgctaccattaatgaatgcgcaatattattacgtccatctccaacgtaagttaagtttattccttctagatatccaaaattctcttttattgtcataaaatcagctaacatttgtgtaggatgccaatcgtctgttaatccattccacaccggtacaccagagaacttcgctaaatcttcaacagcttgttgtgaaaaaccacggaattcaataccatcgaacattctacctaatactttcgcagtatcctctacagattcttttttgcctaattgaatatcatttttccctaaaaattctggatgcgcacctaaatcaatagacgcaactgtaaacgctgcacgcgttctcgtcgaattcttttcgaatagtagtgcaatattttttccagataagtagtgatgcttaataccgtttttcttatactcttttaatgtaattgcaaaatcaataagtccttcgaattctgctttggtaaaatcactttcttttaataatgatctgccttttaaatcatacggtttttgaatttctgtcattattttcaccctcgtttctataatttattacgttaaatgtcttctctgaataatggttgactcatacatctagggcccccacgtccacgtaccaactcgctaccagatatttcaatgactttaatgcctttttgtctcaataaatcattcgatacatagtttctatcgtaagtcactacaacgcctggtcttatacataatgtatttgagccatcattccattgctctctagcaccatcaatgacatcaccatttcctgttggaatgaattggatatcatctatacctagtacgtcttctaaagtatcttttaaatgactagattgtttgatggcaatatctttatttacgtcatcatattcaataataaatatattcatattgccttctgcctttaaaatggctgaatgcattgtaaatttgtcataatctatcattgtaaatactgtatctaagtgcataaaagttcgactagttggaatttcaattgctactacttttttaaacgtcgcctgcggattttcaaaaatacgtcgcgctaacttttcaatagcttgtgcagatgtacgttctgaaacgcctatagccaagacatctttagataaaacaagttcatcgccgccttcaatattgaatgggcaatctcgatctaaccagattggaatattcgcatctttaaatctaggatgatgctttacaatatattgaataaatattgattctcgtcgtcgtgctctccagaacatccgattgattgttataccgtgtcctattgaggcttgtggatctctagtaaaataaaggtttggcattggatctaaatagaatggatacttatcatccatatactctactagatgtgtacatttcggattaatttcttccttacgtacccctgacattattttatctacaagttcttgattagaaagtgtcgcaaataatgccttaatttcttcttcatgacctaatattgtttttttagactctgctaatacatcatcaataaattcacttcttacttgaggattttcaatactttcagctgctaacttctcaaggtaaagtacttcaacaccctcttctcttagcacctgcgcaaaatggtcatgctctttttgagctacttctaaatatggaatatcatcaaatagtaatccatctaaataatcaggtactaaattttctaattcttttccaggacgcttaagtaacacagtttttaaagctccaatttcgctatttactttaattggaccatctgtcatgtctatttcctccttttatctttgaattcatttagagtatagacaatcttcaaacgcttacatgtgattatattcacataaagaaagtcgaaaatttcatatctttttgttatacaatacataataatggatttttatacataaataaaggtattttgggtcaaaatatacattttttattcaaaaatacccataaaaacatgttgtataaagttttttatacagtcaattgaatgactatgaattctttctttccataaaaaaacgcgtacacaagttaatatttggtaactaacttgagtacacgtgatacgaaacaaatttttattattcatttgatacatgtctatttaaataattttgcatatacgtattctgccatatcatttgaggcagttaagattaatgtagtgtcatttccactcaccgtacctaatatctcttctatatttagctgatcgataaaatagtttatgccttgggcgaaaccaggtgaggttttgacgataatgtatgaaccattgatgattgaacttagaacttcatgttcacaatagtgtctaaacttttctctcatctcttgttctgtttgattattaatagctttataaatccatgtctcacaatcgatagggacacgatatatatttagttccttcaagtctttagcaattgttgttgcactatatcttacaccaaaatattcttcaatatatgaaatgatttgttcttttttataaatcttatgctttttaactattgtagaaacaatttctaatcgtttacttttcttcatattgtaaactcctttggtagttacgtttcttgtattaaaaaataaattcatgcatgtttcatttataatttaacactttgttttgcaaaagataataaaaatacatgtaaattttttgtgacaacttttaaaatgaattttgtattctaagtcagcatttaattatcacatatctactacttgtaatgattttagactgccgagtagtctttcggcagacaaccctcacactcctctcatctaattacaaagagagggtatacctacaaagtcaattatcaatgtaggtataccccatatataagctgtatttaaaatttaattatttataagtgtttaacattacttcttcttgtttatatatttttactccacgcctacttcattccatgcttcatacacctgttcagctgtttgctcgtcatataaatctttggccgcttggtataatgcatctttacaatctttgaagtttgaattacttgttaagtattccgttaatgctcggtagtaaatttgttctgatttagatttccctattgcttgaatcacgttataagctgctttatttggaattccagaattcgtatgtacgccaccattatctttttcagtgaatacatagtctttcatatgagctggttgaccaaattgttctgggtttgacatgctgcgtaaagcgtctccctcttttccaggtgtgtagacatcttcacccattaagaaatcctcgtcatctacaaagtatccaaaaacatctgaaaagctttcatttagagcgcctgactggtccttatattctaagtttgcagtctcttgtgtcacaccgtgtgttaattcgtgtgctactacgtcatttgcacccgataaacttgtgaatgtgcgaccatcaccatcaccatagatcattttgtcaccaatccatgcggcattatttctgttatcttgaccaccgtagttattaacatgcgttaatgaaacaattggactaccttggttgtcatatgattcacgaccaaatgtgtctttgtaataatcatatgtttgtttagcgtaataatttgcatctacgccagcacgttgctcatcttttacgaagttttcatcttcattagtaatcaatgttgcttgacctgtttgatcattaaagctaaatgctgataatttaccttgatgcgttaaatcttctaggctaaatccaccgtcaatactattgatattgatatcttttgtatcgccaagtacaccttttcctttaccagtttctgcagcttctttaactaagttcattttttctaaaatttcgccagtttgagcatcaattttaactttccaatgtgaaatttctggtgtcactgtaattaactcaacattataaacgtatttattactgtcaccatcgatttcaactttgttttctttaatgactttatctttaagatttttcgctttattcttatcaatcttaactgctttaaatgctttgtcggctgcgtcatctttacttaatgtcactttattcgttggctttactttcttcgcatcagtatccccattgattaaaacgacttttcctgatttgtctgcgtgtactttcacttctttgtcaggtgcatgaacaccatcaacactcggttgcaatgtataatgcgtaaatccttttttatcagtttttacatcagtaacagcgtaatcttgataaatattttttacattttcggatttaggcaattcttttaatgctttgaccgcatcactcttttgagtcacctcaaatttaatatcagaattagctggtttattttttgaatcaatcgctaatgctgctggtgataaagtgctcaacaatgttactgctgccatacttgtaaatgcatatcttgaaaatttcctcacatttcattcctcctgaaatcttaaaaacagcttataaataaaatattaatttaatttttcagaaaagtaaatgattatttctatttatttcgatactttttgttcgttgattttatttattgattcttttcttttttaaaaatgttatctgtaactaaataaaattttaaaaattgagcttaattatattttaaaatttatcaaggctttatttttgtgaaaatattaacaaatacaaaatagtgctctatatacttaatcaatgcttgaaatatgtgagataactatttaaataatcatgatcaaataaacatttttatcaatttcaaacaactatgtaagacgcaataatcgttattatttaataaaaaagactagaatgcggtatcactcctcacactctagccttaatatgccattattttatttacttgttttgtatggtgtatgtccaactgttacttcgacaactctattatgatcaacgacaaaccagatgcctaatgtctttttagcattttgatagtaaaaaataccgctatcagcttcctttgttttaccattttcttttttcaagtccttgccataagctttttggatatcttttaatgaaatattatttttaactacaaattgcaattgacttgcttcgtttccttttgcagaaacacctttaaaagtttgatcatatttctctactttttttatcgtattcgttttagctaatttaataccattgaatttcacattatcatacttaatcgcgttaataaaattcttatccagaataaaattagcattattaccaatataaccattataagtataatatggggttattgctgcctgtgcctgtttacttgttggcgccgaattttcaacaactgttactccaatcagtgtgcccaatgctaatgttgctgctacacaaactttactggttttattcataattatctctcttttccatacaaatattttattccttacacttttattataactttttcagccataaaaatactaatgattatatttataaatacataacagttttgttatactaattgaagtacacaaaaaacaatgaaaatattaatatcgcctacttttctaatatttattttttaaaatgattatggcaatattgaaataaattatttagcttcacgtatcaactacttttcattaacatggaggcgttatatttgaaaaaacttcttattaccatcgtaattatcgtattaatcggagcacttgggttcgcaatttatgctgcaataaatcattctacatcatcaagtaataaccaagaacaagaaaataaatctacgcataaaaagacagaaaccgaagaaaatgatcaacaagatgatagtgcagacaaaacagataaaaatcaaaataatggcaataacgttactaatgacaatcaaccatcttcaccgtcaaatgttcctaacaaccattcaacagtaccatcgaatacgcaaccagctcagccaaaagactcaaattcaaataaaaataatactcacggtggtggcagtcaatcgtcaacaaacaaccaaaataatcaacaacagaacacaccacctgctaataaatcaaataataccaatacgccttctaaacaaacacctcaagcacaatcacctaaaaattaatcatttgcctgatacgtccacaagtaccagatgcataaattcagaaaaacagcagtgagatatttttctatttgaaatatcttactgctgttctttatttgcataattcgcactctattaaaatcatataaaagttcgctttaatgtcattgacgtatgtataagctctcatgtttaataatattaatacacccttaaaaacgcttacacgaaaaatttagaaaggaggtacatgttaaatgcttgatagacacttaaaactactccagttttttattaaaaatccatcaaagcacattagttctaatgaaattgctgaacatgtcaatgtttcaaaccgcacagttcgcaatgatatccatgttatcaatagcaattttatggatgatatcatcgtaagtattaaatctaaaggatatcaattaaatacatctcagtataccttagaaacgataactgaacgttacacgcatattcaatcatataaagaaaaactattattatctatggcttatcaactgctaatgcacaataaatcgcagacattgcaacaactagagcaagattatctattatctaaaactgtgctcaacgactatttcgttcgaattcaacaatggtgtcaaaaatttaatatcgttttaacaatcaagaaaaaacaaggtattgtggtcgatggaacagataatgatatcactaatgccatcatccatttaaatcaattatcatcagggcatgtacatgttgaagacctaattttaaatgaattacctgattcacaccaaaggatgatttcgcatattatacaagagacacttcaacaacatagtattgaaacaactgatattcaaatacaacagcttttaattcatctcattttaatcattaaacgtaagcaatctttaagtgagctagacacgttaaaccacgatgcaaaattgatatctcaatcttgcattaagcaaatcaacgaaagattaggttatgacttgaacgaaaaagtaatcaatatgttttcattctttattgcttatcattttaataaactcgatattggcatagaacgtatatttatacaaagttatattgatcgcttaatcgaattgatgcagcaacgtattcatgtacctttcaatgaagattcgattttacaacaaaatttatataatcattttagtaaagcatatttacgtattactcaaaacatttatttaaacaatcctttagttatagagattaaaaaactctatccctttgtgtttaacacactttttgaagcgattgataaattagcaattgatactgatatagagatgagcgaagatgaaattgcatttttaacaattcattttcaagctgccatcgagcgtcgtaccaaaacacaattaaatgtagtcattgcttgttattatggtctaggtgtgtcgaattttttagaaactaaaataaataacttatccgaagagttgtcagtgataaatacgattaaactagaaaatataacacactatcactttgacaatgtagatttattaataacgacccatgatattccaaaacaaacgctagacatacttcctaagcacctgacgactatcaaggttgcaccattattttctgaagatgaccgtcacaaaatcagacacgttgtgaagcaaaagcaaaatccggttcaagcacatcatcatatggacactgtcaatttccttgtcgtaaatactgaacaaaaatcacggcatactgtgcaaatttttgaagaagctcaaaaaatattacaagcacatcatgcgattgtagaaggatatatcgaatcagctttagagcgtgagaaatcatcttctacatacataggtaattttatggcgattcctcatggagatcctgaaaaagttttacaatcacatgtgcttatttttcgcacaaaagatgtttttccttggcgacaacacgatgtcaaacttgtctttttcttagcgatttcgcataaagacaaagcttttacaaaacaaatgatgcaattaattgctaacttggatgatgattcagtgaaccatttatgtagtttagatgatcatagtttaaagcaacagttatttgaatacttacaagaataattgccactagtaacggtaattattctttttttagtatcgagaatacgcttacaatatagaaaaggagatgattttatgaaaattgtagctattacctcatgcccaaatggcattgcacatacatatatggctcaagaaaagcttgagcaggtagcaaaagaaatgggtgtggatattaaagtagagacacagggcggtgttggtgctgaaaatgttttaactacgcaagacatcgaagaagctgacggtgtcataattgcagctgataaacaagttgatctatcccgatttgttggtaaacggttgattaatgaaaatgttcgcgaagggattcataatccgagagatctaattcaacgtatcattaatcaagatgcgcctatttatcaatctgaaacaaattatcattcgaaagatcgcggtaagtctaaaagtggtattcaaatggtgtatcaacatttaatgaacggtgtatcgtttatggttccttttatcgtagttggtggactccttatcgccatcgcgctgactctaggcggtgaaacgacatcaaaaggattagtcatcccagatgattcattttggaaatccattgaaaacattggtagtttagcctttaaatttatggttccaatactagctggatatatcgctgttagtatcgctgacaagcccggtcttgttcctggtatgattggcggcgctatcgctgctgacggtagtttttatggcagtgatgcaggcgcaggatttttaggtggtattgttgctggtttcttagcaggttatatcgcaaagtggattaaagatattaaagttccaaaagcaatggcaccaattatgcctatcattattattcccattatttcatcggtcgttgtaggattgatatttatatttttaatcggtgcaccaatttctaatatttttgaggcattaacaacctggttaaaaagtatacaaggtgctaatattattatacttgcgatgattataggtgcgatgattgccttcgatatgggcggtccagtaaacaaggtagcatttttatttggctcagcacttattgctgaaggtaattacgccgttatgggtatggtcgcagttgctgtatgtacaccaccaatcggtttaggtttagcaacgtttgttcaaaagtataaattcaatcattccgaaagagaaatgggtaaggcttccttcaccatgggactatttggtattactgaaggtgctattcctttcgcagcccaagatccattgcgcattatacctgcaaacatcattggtgcaatgattgcatcagtcattgcagccattggtggtgtcggcgatagagtcgcacatggaggtccaatcgtggctgtattaggtggtattgatcatgtattatggtttatctttgcagtgatagtaggtagtcttgtcacaatgactactgtactattattaaaacgcaatacaccagttatagcagtagatgcaccagcgcaacacacgcaacttcatgatacagatattacacaacatgatacagaggttgacaatgtagataacaccgcgaaacattcacatctcaataaaacttctcatgtttttgatcaacaaactatgataattactgatcacgacatgtctcgaaacgaagcaattgatatgttgattcataaacttaaaatttgccgttatgtagagcacacatcgcatttaaaaaatgcaatcctagaacgtgaaatggagtctacgacagctattggcatgaacgtggccattccacatgcaaagtctgatgttgtaaaacaaccgattgtagctgttatgaaaaataatcatggtgttaaatgggagagtctagatggtagtctacctcaattgatattcttaattgccgtaccaaacaacagtcaggatacacatttaaaaatacttcagcgcttatctaaagcgttaatgaatgatgagacacgccaatcactaattaatgcaaacagtactacagaaatttataacttattaatgaaaatatagaggagttttaactatggcattatttttacaacccgtttttaaagacagaatttggggcggtcatgcattaaaagcatttaactatgatatccctaatgaaacaactggtgaatgctgggcaatttctgcacatccaaatggtcctaatacaattatcaatggtccatacaaggatatgaccctagatcaactttggtcacaacatcgtgaattattcgataatgattcacgagatagtttccctctgctaactaaagtattagatgccaatgataaattatctgttcaagttcatccagatgatgactacgctttaaaacacgaaggcgaactaggtaaaacagaatgttggtatattttagatgcagccccaggtgctgaaattatatatggcgtacatgcacataataaacagacgttaatcgacatgattgataatcatgaatttgacagtcttttcaaacgtatacctgttaagcccggtgacttttattatgttcctgctggcactgtccatgccattggttcgggtattttaattttagagacacaacaatcatccgatacgacataccgtatttatgactatgatagacgagatcaaaatggtcaattgcgtgatttgcacttagagcaaagtaaagatgtgattgaattaggcaatcatgaaccaaatactactcctataacaactcacatcgacacacacactgtaactcaatttgtagataatcaatattttgcagtatataaatgggatattcatggagatttaaaattcaataaaccacatgcttattgcttagttactattatcgatggtactggtactttaacagtaaacgataagcactatgacatccaaaaaggttctagctttattttaactacggaagacgaggatattcactttgtcggtaatattagtgctatagtaagtcatcctggataatagcaatgataacacccgtcccataaaagacagaaattactatctcttctgtctaaaaacataaaaatccacacattaaggagctataaccctaatgtgtggatttaatttttattctgtaacgttactttggtcaactttttcagatacgcgcttcatcaatggatctgttacaggttttaaaattaaacctacaacgaagaatcctatgccaaataacgttaatataattaattttgtaattaggatttccggaacaataccgcctactgtttcacgtaatgaatcaattgcatacgtaaatggtaagtatggcgaaatgttttggaaaaattgtggcgtagtttgaattgggaatgttcctccaccacctgcaatttgtaatacaagcaatacgattgcaattgctttacctgggttaccaagtaatgatacgcacgtatatacgattgagttgaaaataatcgaacagaaaatcgttataagtacaaataatacaggtgactcaactcctgcttttaggattaacaaatctccaaccgatacaatgagtgcttgcaacataccaagcattataaagaatcctgccttacctaagaacacttgtcttgtcgttaagactgactctagactcttatgtttattatcaaccgttaataaacttaccatcaagagtgcacctacccatactgacagtgcagtatagaatggtgtcatacctgaaccataatccttaactgggaaaacatcaacagtcttcttattaataggatttgcaataatacccgcttgctttttcaaatcattcttaagtgtgtcgattaatttgtcgactgcatcatctttgtctaatttcttgaaaattttattcgcttttttcaaatctttttcaacatcaggcaatttattttgagaaaaatcagctaaatctgataaagcctttttcgcttgtggctgatttttatttagtaatcctaccgcttgatcataaccatttaataacgttggtaaatttttattcacacttgctgtcgcattagttaatcgctgttccaactgtggtaagtcattgcgcacaaagttagcagctttagctacatcacttttcactttcgggaagtttgcttgagcatttttaacagcactaatgtattgttgttcaatacttggtaatactgtttgtaagcgatcaatacgtgttttaccattttttaaaatagcttgtccactgttaatgacttgatcaattgtatttaatttagactgaacattggataatgcagtttgccctttgttcaattcatccataatacgttgtgatattgatactaaagagctgttaagatcttttttaacataatctctaaatgatgataatgatgaatctagttttgaaagttgatctagtaatttagtagcttcagcagttcctgaactaccattctttaatgcattgcttaattgattaactaaccttaatgattcattaattcgattattagctgcttttaccttatcaatttcttttgataaatcaacattttcattcttctcaatctcttttaatgtatcgataaattgttgattatattgcgttgtgtattctaaaccggacttcacattatctaaagactctctaaaatcagaaggcttgtccgatgctaaaatgccatacgaaatattacgtaatgcctgactatctttttgtgcggctttcgcttgggtatctaaattatttgataatgataataaagagcccgttaatgccgcttccattgatttaacatctttatctgtaatgttttgtgtgttctcgttagctgtgctgacttgtgttgttgttatatctgcaaaactttgaccatcttttttcccgcttgtactttgtggtgtagtcgatacaggcgcattattactatttggtgcggtattttgcgtaacattattatttggtgcagtatcgccacttggtgcacttggtggcgttgatgctacaccattaccagctgcaggtgcactatttgatgtttcgttgttcgccgcgctattttgaggaatctgttgctggtttcttcgatttaaatcttgcgcgcgtcgaattgcatcttgataatcaccgactctacttctaatttgtgtgacgaagcctttggcatcatttaactgtccattagcttgatcaatcccttgactcgcaatgttaagtccttgattaattttagggaactgcgctggcacgtcatcagctgcaaaatttaacgctttttcaattttcggcatataattatttaaagctaatatcaacttagccttttcattaagttgcggaatagcaccattgacttcgtttaattttttctgagcatctaaaatatcacctttataatttcctagttttctaaaatcattggcatatttatctaaatccgcttggtggttattcaaatatacaattttattcgcaaagtcattaatcttaggtaaagctttatctgctgaatataccgcattttttatcttattaattgtcggcacattttcttcaatagttaaacctgctttgttagcttcttctaataatgctcgagttactgttttattaaattgttcattcgctttttcaacgacaactgacgaaccagtatctgttagcttagacgcaacagcgttaatcttctgattcaccttaaattctacatctgctttttgaggctgcttacgtagtgtcccggtaatttcatgtgtaaacttagatgggatgtaaatacctgcaaaatatttacccatttttatctcatgatcagctttctctctacttacaaactgccaatcaaaacttttatttttcttgagtgtattaaccatcgtattaccgacattaacttttttccctctgattgtgtcgcctttatcttcattaacgactgcgaccttgatgtgtcccgtgttgccatatggatcccacattgcccataagttaaaccaagcgtagaacgatggcaaaatagctaagcctgctaagataatccacacagctggcgtcttagctactttcttcagatccattttaaataatttaaatgcgttcttcattgtcacactcctatgtaggaattattcatattttttatatattttttgtaaattaatttatttttgcgttgtgaattagtataatcaatttactggaagatatttagtcgattgatacctatcaactattttcagcatacgataaattataacaaatcatagtttattatcacacttaattattatatttttcaagggagaatacgaaatatgcctaaaaataaaattttaatttatttgctatcaactacgctcgtattacctactttagtttcacctaccgcttatgctgatacacctcaaaaagatactacagctaagacaacatctcatgattcaaaaaaatctaatgacgatgaaacttctaaggatactacaagtaaagatattgataaagcagacaacaataatacaagtaaccaagacaataacgacaaaaaatttaaaactatagacgacagcacttcagactctaacaatatcattgattttatttataagaatttaccacaaaccaatataaaccaattgctaaccaaaaataaatacgatgataattactcattaacaactttaatccaaaacttattcaatttaaattcggatatttctgattacgaacaacctcgtaatggtgaaaagtcaacaaatgattcgaataaaaacagtgacaatagcatcaaaaatgacactgatacgcaatcacctaaacaagataaagcagacaatcaaaaagcacctaaatcaaacaatacaaaaccaagtacatctaataagcaaccaaattcgccaaagccaacacaacctaatcaatcaaatagtcaaccagcaagtgacgataaagcaaatcaaaaatcttcatcgaaagataatcaatcaatgtcagattcggctttagactctattttggatcaatacagtgaagatgcaaagaaaacacaaaaagattatgcatctcaatctaaaaaagacaaaaatgaaaaatctaatacaaagaatccacagttaccaacacaagatgaattgaaacataaatctaaacctgctcaatcattcaataacgatattaatcaaaaggatacacgtgcaacatcattattcgaaacagatcctagtatatctaacaatgatgatagtggacaatttaacgttgttgactcaaaagatacacgtcaatttgtcaaatcaattgctaaagatgcacatcgcattggtcaagataacgatatttatgcgtctgtcatgattgcccaagcaatcttagaatctgactcaggtcgtagtgctttagctaagtcaccaaaccataatttattcggtatcaaaggtgcttttgaagggaattctgttccttttaacacattagaagctgatggtaatcaattgtatagtattaatgctggattccgaaaatatccaagcacgaaagaatcactaaaagattactctgaccttattaaaaatggtattgatggcaatcgaacaatttataaaccaacatggaaatcggaagccgattcttataaagatgcaacatcacacttatctaaaacatatgctacagatccaaactatgctaagaaattaaacagtattattaaacactatcaattaactcagtttgacgatgaacgcatgccagatttagataaatatgaacgttctatcaacgattatgatgattcatcagatgaattcaaacctttccgcgaggtatctgatagtatgccatatccacatggccaatgtacttggtacgtatataaccgtatgaaacaatttggtacatctatctcaggtgatttaggtgatgcacataattggaataatcgagctcaataccgtgattatcaagtaagtcatacaccaaaacgtcatgctgctgttgtatttgaggctggacaatttggtgcagatcaacattacggtcatgtagcatttgttgaaaaagttaacagtgatggttctatcgttatttcagaatccaatgttaaaggattaggtatcatttctcatagaactatcaacgcagctgccgctgaagaattatcatatattacaggtaaataagtattatattaaacccgtaaaatttataagtataaacaaggagttcggacttaaacatatttctgttcataagtccgatttcttattcaattaaacccgaggcattcagttcgaacgcctcgggtcgttttatataaatatattattttatgttcaaatgttcctcatcatatccgtttcaattgccatctcacacattttataaatatgagcaaatgtacttattctcaaacattactgccgagctttaattgacgttatattaactataaactacttttccatgactctacggattcaatgtcacatgagcgtgataaaatttgttcaataataaagtcatgtttatcatctgatctatcaccaacagcatcttctaaaacagtaatataatagtctttatctacactttctaatgccgtgctcaatacagctccacttgtagagacacccgttaatactaaatgattaatatcatttgcacgtaaataaacttccaagtaactacctgtaaatgcgctaaagcgtcgcttagaaataatcggctcatcttctagtggtgctaaatcttcaagtattcgtgtagatgcatctgcttcagtaatcgcatatccttgagctttaattgttgaaaacactttattactcgaggagacatcattaaaatgcttatctaacactaaacgtatgaaaatgactggtattcgatgttgtcttgctgcttcaattgctctctgattcgctttaataatattttttattctaggtacactactcgctataccttcttgcatatccaaaactaatagcgccgtttttcgagacatcttcattctcctttacttgtgtagttctaagtcgttaaattcattataacgttaaaatgatggacaatctattcattgcattttgcatatacttcacaataaattaaggggaaataagacgtcttatatacttaaaaaaatatatagatgctcttcccccaatataattatgctttatttttcaacttattgcgtcgtgataaccaaatcattagtacacccattgcaccaacaattacagatatcggcaaccaatgttcttttatcgtttcccccgctttaggcaaagatacattaccatcagcatttaataatccacttaacaatccattacctttaccaagtgttaacgtcttttctggctttggtgtgggtatatctggaatactgtctaataaatctgatccttgattcattaaatttgctaacttatttaaatctgtcgttttcccatttttattcaatcgatctagtaaacttggacgatttactattggtgataaaatataatctatatcttttttcgtttgattgagtctcttttgtaaattcaataaatcatccgctttaccattcaatgccgatttaactaaattaaaaattttattttgatctgtttctattttagtaattaaatctgccagtaattttgccttttgtctttctatacgtgttgctaaaatcgtttcaattgcttgttttttatctttcgcattattcaaaatttcttttaatatatcatctgaagacgtgtcgccagttgatgcaaaatgtttcttcaattggtcaacgatttggcgatttgataatcctttattcgtccaatctttagccaatttatctgcttcagcttttcctaatttcgtttgtaaaatttgagaaatcaatagcgacttatcttgtgattgatcaatcaatgacgttaataaatcatcactcgttgtcagagatagttgatcaatatgacgagtaatttgatctgcaatttgttgatccgttttaccatcaacacgtatatcttttagaattttatctgcctcgtctttattaaatatactttctaaaatgctttgtgtagcatactttttatcatcagtacgtgcaagttcttccaaaataatatttcgttgactttttatacgctctttcgtcttatttacttcgctcattaagtctgatttttgatttttaggaagttgcgtatttgcaatacgttgatctaaagattgtaacgtattcagtttataatatgtgtaatgttgcgttgaggcattacttttagccaatttttcaatcatagcatgattaattttatcgcttccttgtaatttatcagtgagtcgattactatggctttgattctcttcatttgaaagaaatttatttaacacaacatgtccagaaccatcattatttggcgttttagctacttcatgattattatctgttgtagacactgctggatcttccgatgtatctttcgatgcatctttcgatttgtgtatttgctgattcaaatggtctaggtcttctaacgccttatttaccattgcttcatcatttttatcatctttttctccatgttttgttgtagccgtttgtgacatatcatttttcattgcattaagatcgtcctcgccactttgttgacccctatcaacatttaaagaaacctcatttaaatctttaagcaattgatctaatttactgtctatatcactttgaccgttcatttcagtgtgagaacttttattgtctttgctatccaactcattagctcgttttatgatttcatctatttgcgatgctgttttcgcttcatttagttgtgctttataatgttctttagatgaagccgataactgttttaattgctcaatttgacgaattgccttgtcaactttgtctaataaatcttgcttagataatatctcttttgtaatttcagtatccttttcagatgcagcttgggcatcgtacggcaagatattcgttaaaatgatacttgtcgccatcattgtcgaacacgataactttacatataattgaaacggtttccctcgatatttagccatcaacatactccttcctcacttacttccttcaaagaattacatactattatatacctgttcacaagaaatttacacttatctatctagttattgttgttagtaattatccacttattacttagcttatatttaagtaaacaaaaaagcatgacgtaatatcatattgtccatgtcgctaacatcatattacgtcaaatcttttatattaaatgatgttttattttagactgctttttctttttagctttcgagcgcctgtttaaaaacttgctcgaattgttcacgcgagatttcgtgtgcatgtgctttttgtgctaataaagcatctcgaaactgttgttgatctttcaaactctctaacatttgtattaattggtctttactttccattgttatctcatcattatgctcaaataagtgctctgatagtgttactttagcatggtgtgctgtttgacgataacctaaaatcaacaactcatagtcaaacgcttgttccaccgcatttaaaatttcattaccctcattaatatcaagataaatatcacataactggtatagttcatttaccctatctatattaatagatgggtataaatgcacattagcatattgatcaagttgcattagcttatcagacatctctgtaatagcagcgatgtgaaaattaaaatctggtaaagtttcaaccaataccttgatgttacgaagttgatccgagttagttaatattacaatttctttagtatatctattactactacgatagttatatagatatccgccttgtaaaatacgagattgaacctttgcgtctgctatattgagcatcgtttcatattcgtttttatctggaataataatattacaatgtcgtttcatatcacctttacacatcaattgcatatttcccgggacattaccattacagtgttcttgccataccaaaacatcactaccttttgatggcaaattatataacactgaaaatggtagggctagtgagttaataacgaaatgatgttccgtaatttcaagttgcttgataaaaaataatacgaatgcgagctttgaagggaaaaagtaagacttcccttgccaatccaatatgacatccgatgttacaaaattttcataaatcacttctttaccttctgctgtcatatatttcttcaagatcgctttacgatttaaatcgtaaacagtttgtgcaaatttaataccattcttagaataataatcgacaaatcggacacgttgttggtcatcaaaccattcgacacgactaacaattctagggcgctctccactttgataaaatattttgcctcgtagacgtcccatatcattaattgtagccgaattgttgttacctttaatttcccaaaaagctggtacagtaacctgattaaaaaatcgtggtttcatattttctgaattatgattatctgcaaaaaattgatacggtgatataacatcgtccggtaaaaagccgttgtcattgagtacaattgttaaatcttcctccaacttactggctttaaaagactcatataactttcgtgaatgatcgttaaagtaatcaaataatttaatcatgcagcacctcttgaactaatgtttcccattttaaaataatatcttgagtcataaattgctgtgccacttcataagagatgtcatgtggtgtctggggaccattgttaaaatacattacaatggcatgagctagttttgcgacaacatcatccacactatcttcatcggtatcaaaaggtaccaagtagccattttccccatctcgaataaaggttgggttaccataattcacatttaatccaatcatacctagtcctgagcctaccgcttccattagtgttaacccaaaaccttcgctagttgatgcagaaagaaataactcataatcattataaatttcatcaagtttaacatgccctagtaaacgaatataatcttgtgcgcggtgtgtatcaataattttacgcagtcgcgtcttctcgctaccttctccataaatatcaaatgttaattctggcacttgtcgtttagccacgataaccgctttgacaagccaatcaatatgtttctcattcgctaaacgagatgcactaatcatcgcatatggctttcttgataatgttggatatgataatgcatcaatgcttcccacaggaatagtataaacacgtgggcgataaccttgatattgctcaaattgtcgacaaaccatatgattttgaatatctgttgctgtaataaagaaatcaatgtatttagcttttgaaaattgatattcataataattgttccatagtatatgctgctcactcatcatattattactataatgatcagcatgaatcacaacaccaactttactatcacctttatgctgcaaaacagcctgaccaatatcagaagcgcggtctaatatgacaatatcgtctcgggttaaattcaatcgttgtaaaaagtatgcaataaattccgttttgttatacaacaccgcatcttcaaacacatatatagagctgtctccatcaatatattcgttataagcgatggaaccatcttcattatagaattgtcgcatatataatttcgctttattatcagctggtgcataatactcagaaaatatacgcgtataactataaaaatctttacgtactaacatactattaattacaaattctgcacgatccacaacatctttttgttcattttgtagataacatgttacaaatgatgatttcccattaaaatatagacggactatcttaccatttctttctctaaaactaatttcatgaccaagctcacgttcaatgtcatctaacgtgtacgttgttggtgctatagaaatatcactaaaatactgatacaaccaaataacttcttgatctttaaacccaatgttttgcgttaatgtctgtatgttctctgactgtataaaatctaaaaacacaaatttagtgtcttgatttgtacgtctcaataatttagcacggtaagcttgtgcatattcaacaccgctactcgcccagcctataccaaagtttatattatatattgtcatgcgctaccccttttcatttatggaaaatgtataactggcataccctctttatcaaatgtaatcatgctttgacaaatatttttcaccattctttttttgatatttcgtgtcataacttcaaatgaatctaatgcaactctatggtattcaaaaatagcgttacgttgcccattttgtcgttgattaacgcttgcttttaattgttgtaaatagtcgacttgttctaaccaacatgaatcaattgctttcaaaaagactttttgaacgaaaatattataataatatgcactttgcatgtttttatgattcaaagctaattgcttttcaaattgctctaataaaaatgtcactactgcttgcttatctttaaaattaacacaagccacatctttattaaattggaaacttaaattttgataaatatactcgacaacacgcgattttgttagcaccttttcctcatttacaaacatttcaaatacatctttagctaacgctttaaaatctcgattctcagcatcatctatttctaaaactcgattgcgttcctcgtatacaagatctcgctgtatactaatgcttttttcaaattcattagccatttcacgagctttaaccccttgttcttccgagatacgctgcgctttaactacaatttgcttaactttgcgattaaacaaattactttgcgataatcgttgtgcatctaatgaatataattgattattttccgctaaattactatcgctccatcgcttaactaaataatcatctagtgaaatatatatacaagatgatcccggatccccttgtctaccagaacgaccacgtaattgcctgtctacacggctattttccatatgttcatgaataataacagctaatccacctaatgcttcgacaccttcaccaagtttaatatctgtgcctcgacctgccatactagtcgcaacagtcatggaaccaatttgccctgcttcagctatcatctgcgcttcttttgcaacattttgcgcaatgagtaaattattaggaatatccatttggaataatactttcgaaaagtattcagccgcttcagcagttctcgttatgagtaaaaccggtcgccccgtttcatgaagttcaactatatcatgaatcatcgcgatgtttttctcatcaactgaacgaaacactttatctggttcatcgatacgttgaatcgctttatcagttggtacttgtacgactatttttgaatacaaatcaaagaactctgattcgcctaattttcctgtagctgtcatacctgaaaatgattcaaaaagtttaaataaattctggaaggtaattgttgccataacacttttatctgttgaaacctccataccttctttcgcttcaatagcttggtgaagtccagcttgcaacttagttcccagtaacatacgacctgtaatacggtcaattaaaacaatatcaccattatatacaaagtaatcgacattagattcaaacaaatattgcgcgcgcagtgctagattaatattacgcactaggaccatcgcttgttcgctatataaatcttcaacattaaagtatgattgtgccgcttcaataccttgatttaacagccatatttcttttttggtcttcttcattttaaaatgcacgtcttcaatcaatgtatctacaaactctttcacaatatgaaatagatttgattgtaatcttggtgcgcccgaaataactaatggtgtttgcgcagcatctaaaatgattgagtccacttcatcaataataccgtaatttaattgtggtaaaaatttcccttccgcactatcagccaaattatcaattaaataatcaaaaccgagacgtccattagttgtatatataatatcatgttcatataaattacgtttttcccctttttgatactcataatccacaatatcaacaaaacctaatgaagcagttaaacctaaccattcatataatggttgcatctcttcaaaatctcgcttcgctaaataatcattcgttgtaattaaatatgttccttttcccgaaagagcatttaaatataaaggcatcgttgccgttaatgttttaccttcgcctgtttgcatctccgcaatgttaccttcatgcaatacaatcgctccgattaactgaacttctttaggatacatacctaatactctccagctcgcttcacgtgccactgcataagcttcaggtaacaatgtatctagtgtatcaactcctgatgctaaacgttctttaaattctattgtcttttgttttaacgcatcatcagaatatgatttaacttcatcgctccatgtattgatgcgtttcactatttttctaatcgactttagtcttaattcgtttatcgtaacatctagtttatgtttcatttacttccccaccattcagtttcgatacatctaagtaatctaaaaatcgtactggattcattaaacgtgacatataatttagatgtttgtcttgctcttctttaaaataaacctcgacatttgtatcttttagttcatgatttcctgggacatgttctgtaagccatccttttaaatcatcatcttcatggcttgtacgatacactttgcaacccaaatgctgagcgacataagttgcaaaaacatttgactttgacccataactaatcaaattaatagcctttagggtatcttgactttgcaaatcattctttagttgcttaatatttccctcgatattgtcgtccatccaacgttcaacgagccaaacatgaccaaacagtttcaaaaaatcattcgaaatagttggataggtgtcagatggttctgcaataatgacattgatcatatcatttccatattggtcatcgcctatcttcgtcacccgcatgcttttatactctaaatcatcttgatgcgtcatctctgtgattgttaaacatctaaatataagactcgtcgatgctgcattcatcatttttattttataagcataggcttcatcaggatattgaatcgtaacactatttgactttacaatctcagtacttagttttgtgccatttttattataaaaaatgatgataaaatacactgaaccagcaggcgttgcatcaaaatcaaaatgcaatttataatgctgtcctctacgcaaaattggtaaacttggcgcacttttatattttgaaaattgctttaacatcaaccactcatgaatcggtaatccagagggcatcaaaggatttataaaagtcacttcaccatttgaaaatgatactttagagccatacataaatgtagtttgtgaaatataattccaagtaactttaaatgttttgtttttcagcatgttgaactctcccaaacttgtcttccaaaataatgttgtaaaaattaacaaaccaacttgcaatggtaggtgaatcatcattatgtcgcccaggaatactgcgattcatcactcttgcttggtgtgctgtcaatacaggtaatagctcttgaaatgcatgtggatcataatcatcatgttgcatatatgctatggcaaaaacagtttgtgacaatgatttcttttgaaatgtttgccaaaatttttgatttaatgcctgtatcgacgcttgagatgtatcaccttcattagacaccaggacgtctaatgctgtaccgaactcttctggtctaagtaatcgcatatgttcagcaatcgttccaatattaacaagtggtttaccaacaataattgcctgaggatttaactgagcaccataatacaaggcaccaaatgaacccatagataaaccagataatattaattcatgtgatttaaaattcagcttttctaatgtctcgtcaataacattgataataccttgttcatattcagatgaaccgatataaaaactaccaccttcaacacgaggatcgccgataagtaaaaacggtgcattcatacgtttcatcatataatatccttcgaaaccttccgctgttcgataaccactaaaatatacgtttagtggcggtttcatatcaccagggtggaaataataaataaattcctgtcgttgactatctacgaaacgactaccaccaagtaaaaattgacccatgtctaatctagaccatcgtttgtgtataggtcctaaatgtaccgtcccgttcccacgcgccttaacagttacacttatataagcatcaaatggtttcgcaggtatctctaaaggactgtctaacatatcatcagtcaatacgatttgttcaattaatgcaccatcagcgccagtctgaatcaatctaaatgtatattgcaactcgaccgcaccatcaatatcaaattctggccatatttgaatgactttatctttatcgtaaacgagattattttgccaagatgcgataggtttaaattctttcccaaattctccactcaatgtgagctctgaattaccttggtaaacgacatctcctttaaaattcggatgcacaagtgctaacttaggagaaaccttatctccatactgtcctgagaagctaactgcctctaatttattattacgttcttcaatattccggtaatgtaatggttgaacaacgtatttttggacattttcgtcttgttcatattcaactgaccaaaatgattcatcaacatacgtattgtatggttcgcttatcatttgtaataaattcgttaatgtctccgagtatggtgcttgaatatagataaaatcaaagcgcccttctgcttcaacaatcgcttcaatagcctctacataaccactatcaaattcaaacaatccaatatcgaagtaatcccaactcacaccttttttgtgttgaaaaataggttctaaatcgtctcctccaatttgcaaaactctaaatttacgtggcatcattttcaccttctattaactcatcgagctgattaataatattcttagaagcatatgcatctattaattttaaagaataggcgtacgcataattccaatttttcaaataaaataaataataatttaacgcatcatctaattcatcaactgtatttataatacggccattgtcataatcagagacgtaatctgtttgttgaccattaatttgtggaatcccagcgctaattgcactaatttgtaaatacaaatcaggttcttttgacatatctatcacaagtcgcaacgtccgcaatgcttctacaacatcatgttcagcatgtatcgtcttaacagcaatgatgtcatcttgatcttcaggtgtcattaatgctgaaacattaacatccgcattctgtttagcttggtattcctcatttaccgacgtaatacattcacgaagccacatcggtatgtcattttgatggcgcgataataaaattaaacggtaataatcttcctgtgcgatataatccacaagtcgttgcatcatttgttgcaaatcagcgtcactcataccatctatccatacacctataaatgtttccatcaattgactacttatattaggtgattgtctcgtttcaaatggtgtgattcgaatcattgtattctcccgctgatacttctcttgatgactaattaaatcacgttctagttgcacactatcaacaattaaatgggcattctttacgatagattgatattcctcatctgacacagtttcatttctatttttaaaaaatgaataacttaatgatttcgctggaatatgattggctatttgtcgattgtgcctagcatctgaagccacaatcacatgatcatcttcatgtatttgttgtgcaatcattgcttgaaatttttcttcaattagttgagccatattgttatattctgtttgttgatagtgatgttgatatctttttgaaacagtgactctgccatttttcaaatcttcatgaagtacacaatctccattaatcgttaaatattcttggtaagaagcctctccctgatcatcaaaataacgtatcgctgataaataacctctgtcatcaaaaatataacgccgttgtaactgatctctttcaaattcttcaaaccaaattgaatacccttcttgactaaaataaatatttgtataggtctgttcactcgtcacacattttaataaatacggtgtgtacacaaactcaacatcatccggccattttaagtgatgataattaatcgcttgtggcgcatggtgactgaatccttgaatttcatcaaacacagacgaatactttgtctcatataagtcatatcgatgtaaaaatgttcttaaatttggtgcatgattgagaacaatcagttgataatctaagtcattttcaaggtgcattcccattaaactaatcatatcgtcaaattccgtcttattttgtagttgataatacggcacagtcgtgtcttgccaccatcgttggtcatcgtaccaagctggaataaagtatttcataattacctccttaccaatactggtttaaaaatggcttatatttatcaaaatataaatatgtacgaattgtttctgcaatattaatactgatgtaaactaatacaatcagttgtactgagaaataaatttcagtagataaatgcggtacaaacaatgtgaaataaagcggtataccaataatgactgtaactaatgccaatccaaaccaacatacgcgtcgtgcttgataatttaaataacgttctgtatccttaccaggtttaactcctgaaaaataattgccactctttaagaaatctttggatttttgtttagtattgattaaaaatctcgataaaaaataacccaataacatttgaatcactaaatatactgaaatacctactggactatcaaatgtcagcattggcatgtcatctgatatgcttttattaaacatagataaaataaaatgaatgccactttttaagaaaacaaaagctgaaatactcatcattaaagtaatactgcctgcagggttaactttccaagataaataagatttcatatttgttgcggaaacgttcattaaatcgatatatggtattctcacttctactaattcaataaataataagataaacaatgtgattatcacaaggatgattaacaacgcaatcacaatatgacttgcatctatatattccattttttgatgcatcattgatttaataatactaaccattacaatcggcattggtcctgcgatgccgtagcgactatttttgtcagctaaccaaactaataacatcgttccagtaaccaaaatcaatattgttaagtaaatattgtcttgatgaacacgttctttcgaaacatattcatgaatcacaaaataactttgaataacacttaaaattaatgttaagatgcgctctttataatgcttctcaagacttgtttgtttcatgtatttatccatattccgataagaaatcagcatcaagataatcattgatgttaaccacggacctaatcctaaagtgaaaatgtttaaagtattaacgtctccacccatattagaaatagctattttaaaaaatgactcatgttttacttgcatatcgttataggaaacgatggaaatgtttgtgcctaatatataaataaacaagataaaacatgtgtatagcatacgtttatatataattttatattcgtattgttgtaaaagttttaacatgttgcacctcttttatatcaaaaacattaaaaagactaagggttcatcactaattattaaaatcctatatcgatttttctagtgattggtgcctcagtctttttaattttagccagctataaattcaatttatgcttgagaatcatcttgatcattttcatctttctttttctttctcttcattaaacctaaaccaactaataatgtcataacgccacctagtaatccattttgttttattgagtcacctgtatctggcaatcttttttcactttgtgctggtgtgccattatgtttagtcacttcagatgttgcacttaatgtagactgagattcactcgtgctcgttgttgcttcacttgataagcgagatgtgctcgtgctgtgagtatgatgcatactcattgagtctgacggatgcattgagttagattcagatgtacttgttgagccggacatacttgttgatgttgagtcagaaatgctttgtgaaccagacatagatgtactcagtgattcggatgtgcttgtcgaatcggatgtgctcaatgacgttgatgtgcttgttgacactgattctgagtcactaattgatgttgagtcggatttgtcttgtgacattgaaacactcgatgaattagattcactcattgatgttgagtcagatacgctcgttgaacctgaaccagacgtacttaatgattcagatatgcttgttgaagttgaaccacttgttgagtccgatgtacttgtcgatgtcgagtctgaatctgatgtactcaatgattctgagtcactgatagaagttgaatcacttgtagattctgattctactgtactttgtgaaccactgatacttattgaagtagaatcactgatactgtctgatgttgataatgatgtcgacaccgatgtgctttgtgatgacgatgtactagcactcattgacattgatgttgatatcgatgtacttaaggaaccagatgcacttgtacttgttgactggctttgtgacattgaatcacttaatgatgtagatgtgcttgttgagctcgagtcacttacacttgttgaacctgatattgagtcacttaaacttgtcgatgttgaaactgatacgcttccgctcattgagtcagatgttgaaagtgatgtactcgttgaatttgatccactgatgctagacgaatcacttgtagacattgagtcgctttctgatgcactgatgctcatagagtcaaattgactattacttgttgagcttgactgcgaatcgctcacacttgttgacgttgattctgatccactcatactttgcgagctactcaatgattttgaatcacttaatgaatccgaagtgctaagacttgtggaaccacttaaagatattgatccacttaatgagtcggagtcacttgtactagtagaatcactcattgatattgaatcacttagcgaggtagactcgcttacgctttctgaaccacttaatgatgttgaggtactcaatgaaccagatgtacttgttgaagtcgaaccacttgttgattttgaatcacttaatgaatcagattcactcacgctttctgaacttcttagtgacgtcgatacacttaatgatgacgaatcgcttgtgcttactgaatcgctcatcgattgtgagccactcaatgaacttgactcgcttacactttctgattttcttaatgacgttgagacgctcaatgagccagaatcactgacacttgttgagccactcatcgatttagagtcactttcagaattagattcacttacactttctgaatcatttacagattctgacatactttgtgaatcagatatgcttgcgctcattacttcactagccgatgttgatgtacttgtcgaatcacttaacgatatagacacactcatcgaaccagatgtactcgcacttgttgagtctgatgttgaatcactaacactatcagataatgacgttgaatcactcatacttgttgatgtacttgttgaaagcgacatactttgtgaatcactagtacttgtacgcatcgaagtactagttgaagctgatgtactacgagagtcacttgttgatgttgatgtacttgctgatcctgatgcacttgtacttcttgatgtgctttgtgaatcgcttaatgatgttgatgttgaatcggattcacttgtactttctgatgttgagccagactctgatgtacttaccgatgtagataaacttgcaatggtcgacatgcggtttgaagttgatgtacttagcgaatcacttaatgatgctgatgtgctttgtgaatcggattcactgctttgcattgacgcagatgttgaatcacttaaagatgttgacgacaaatcggattcacttgcgcttgctgagttactgagcgatgttgacgtacttgctgatcctgagttacttgtacttgttgagtcactgagtgatgttgacgcactttctgatgttgactcacttgcacttgttgagatactttgtgaatcagattcactctctgaaccacttaatgacgctgatgtgcttaccgaacctgattgactcgtacttttagatatacttgttgaatcgcttagtgacgttgatgtcgatgtggattcactttggcttgttgactgacttgtatatgatgatgtgctttgtgaatcggattcgctcgtgcttgtacttgttgagtttgaggcactttggcttgctgagtttgagtctactccgctttgattcattgaggcacttagtgacaatgatgtactcgttgagtcagacaaacttgtactcgttgacgtacttgtacttcctgatgttgattgagacatacttatgctcattgatgttgaatcggatttactttcacttgtggaatcacttaatgatgttgacaaacttgtagagtcagacaaacttgtactcgttgacatactcagtgatgttgaaacactctcgctcttaaacgttgacgttgattcactgatacttgtcgatgttgaaatggacgtactaccacttgttgaattacttaatgatgttgatgtgctaccagattctgatgtactgtctgataatgacgtactctcacttgtcgaactactcactgactctgatgttgattcagacgtactttcacttaatgattcacttaaaaaggcagatgcactttgtgattctgaatcgctagtactatttgattcacttaatgatataaacgtgctctctgaagcagatattgcttcacttatagagtcgctcgttgacgttgattcacttattgaatcagactctgatgtacttaagcttgtggaatcactcatagatgttgatgtacgttctgaattacttgtacttaacgatgtcgaagtacttaccgaaccagatgtgctcgtagaagcactttgtgatattgattcacttgatgcagttgatgctgatttgctatcactcgttgaatcactaaacgacgttgatatgctcattgaatcggattgacttgcactcattgaaccagacgtactttgtgattccgaagtacgtactgaagcacttgtcgacgttgatgtacttgttgaacctgattgactagtactttgtgataatgacttactatcagaatcagatgtactttgtgaatcacttaatgattctgatgtactacctgactgagacgtgctcattgaactacttacggacattgatttactgtctgatgcagataatgacccacttgtactgatagagtcacttactatctctgaagtactcatcgattttgaatcacttgtacttaatgatattgatgtactttgtgaatctgatttgcttgttgacgcactttgagagttggctatgctatttgaaatactgatagagtccgaggtgctagctgactcgctcaatgatgttgatgtactaattgcattcgatgtactgtcacttaatgatgctgatgtactagacgaccctgatatactcgttgataagctttgtgacttagacaagcttcctgatgtactcatacttaatgagtcactgagtgatgttgatgtacgcaatgaatcagatgtacttgttgatagactttcggatttttcagtactgctagagtttgaaatagaatcgcttaatgatgttgatttactagctgaatccgacatgcttgatgatacactttgtgaattcactaaacttgtgcttgttgagcttgatacactattactttcagatgtgcttaatgacttagatgcactcacagaatcagataggcttacacttgtcgatttcgaggtactagctgatgtagataccacaatcgatcctgatgtactcgttgatgcactttgtgagtcagctttacttgttgacacactttgagattgttgtgtacttcctgatgttgatacggaatcactcatgctatttcttgttacttcatatttaaaagttgtcgtcgttttgttaccgctcgcatctgtagaaacgattgatatagtacttgtaccaatgtttgttggtgtaccactaatagtattatttgtactatcaaatgttagtccggatggcaatccagtcactgtattcgtcaccgcatttccactgttatcttgcgtagcaattttaatcggggatattggtgaatacacttctgatgattgatctcctattggtgtcactgttggtgctgtcgtatccacaacatttattgtaaaagttgtcgtcgatttgttatttgcttggtcagtagacacaactgtcactgttgattgaccaatttttgttggtgtcccaatgattgaattcgttgcactatcgtaacttaatccgcttggtaatcctgtaactgtatttgtcacagtcccagtaccattatccgttgtagtcaatacaataggattcattgttttacccacttctatggtttgattgcctacagttacagttggtgcttttacatcagtaaaataatatgtcactgattgtccagcattcgtcatttttacagttttatttgtatcattataagttgacgcatatgaactatcgacggacgtgtagttatatcctttagcagtcaatgcagattgctgattatcgattgtcacgacttgatcaacatttcctgaatatgtttttggtggaataatatctttacctgttgttacatcaacgtatctcacttgtgtaacagcagactctgtatattcgaatgttccaaattgtacttgttgtaaatttgtcgcgccacctgttgaggctgtcattgataatgaaaagttggtcgtaccacttttcgcaatccaatctgaaatattacgtgtccatgtttgacctgcatatttgacagtcataacctttgtatcaccattatagttaatatcaaaatcttggaacgtgttatttgtaggttgaacatttaacttcgcagcattatcagctgttgaacttgatgtatacgttgtcgcaacaccataactatctgttgttacaaatgcaccaaacgcacctccaccagctacattagatgggtcagcattcgcctttgcagctgaatttggtttagatgtattgtgatacgtatccaatttgaagccaaatgcgttacttaagccaccaatacctactgcggcaccgtttaaccctgtttcacctaatacacctggtgaaaaggcaaaaccgataccatctccaccatttccatgcccttcatatttgttacctaaatttacttttccagaaaaatgaaaactcttattagagtcaatacgtgttcctaatgtaatagcacctttttggctgtatgcatcctgtgttaacgtcacaataccggtactttgatcataggtagcattacctgacgttgtcatatattgttttaagttatctttattaactgtaattgtattagcagttactgcggttgtcgtcgctgctgacgcaaatgttgacatagctaagcgactgaaagttcgaagttttactggtgcggtgctagttgacgttgtgctagttttgtttaagttgaccgaagatggcgttgtgctttgtgaagtgttatttgatgcagtactttgatttgttgatgtattaattggttgttctgtacttgaagttgaagctacagatttagtatcagaacttgatgtagtattctttgaggatgttgattctgatgtagatgtcaatttctcttgttgattgcttgtactattagttgtcgaagtgaccttttcagacttttcacttgagactgtgtcactatttgatgtttgtaccgaactactatttttcgttacacttgtggaatcggctgttgatgttgatgcttcgattgtcgttgagttttgattacctactgtttcactttgtgtgtttaattcagaagttaatggtgcatcagaagccgcaaaagcttgctggtcatgcaacatatttaccgtgaatgcaccaccaataaccgccgtagttttcaatccgtatcccgtcatttttttactaatgctttgattatcttgactcactaaactatgactaataaatggtagccccataattttgaacatttctatttctttaattccggattttacccaattttttccagatttataaagtcttactcttgttttttcgtttgctaagctgtcatgaaatgctttctgtcttttactcatgtaataactccttgtattatctttacattcattagattataatatatgccactattcaatttaatacaactcttttttgatacaaaaatactcatttttttaaaatttgtaaaaattcatttttattcgtctaaatgtaatcgttttcatatttttaaaattactttttctcgtttatgcgtataatctttttttatataaatttggctaattggctttatgtttaatcattataattgtttcgtttttaaaataattattgtattaatatatctataccatccaccttttatttataaatagttaatttacaactaaacgataaatattatatgcaaaatacatctttaatattaaagtaataccaatattttttcaataaacctagtgtaatatatgtgtaattctaaaagattcttctttaaaaatataaataccacgacatattgctttaacattttcatttataaagcgaaaaaatgcatcgctactaagttgaatgtttagtaaggatgcattgaattcactaaaatgattaaattacttatatcttttcatctgattgattatcgaaatttcttccttctaaacctgctaactcttctttagaagctgcaggtgctttcatttcaaatatctcattcactactgtgtaatcgtaatatcctaatctggcaataggtttaatcgacttaatgtccaatttaccattatcaagaataaccttatcgtcaatatgaacttgggcaactcttcctataacaatatctacggtagatactggatctccagttggaatacgaatcgtttgaacgtactcacattcaaaatgaactggcgattcttttacacgatatcctggagcttctatacatttttcctttgttacacctgcaaaattaaattcatcctcttctggtggcaatgctttcgatgataaattaactgcttctcttaaatcatacgttgccatattccacacaaaccaacctgtctcttcagcatttttcactgtatctttacgttcgtgatcaccaagaacggattgatttgctgcgaacataaccataggcggatcccaagttaagttttgatactgactataaggcgctaaattatctttcccatctttcgatacagtagagatccaccctattggacgtggtactgtactacttttaaatgggtcgtgcggtaaaccatgacttcttacaccttgttttggcgaataattcatactatcttcaccccttataagtaattacatttaaggttacgccctctttacataagcgtctaatataaataaacaatttatttataagtagaaactatatatgacgtggttgcttataatttgcgttcttgattcgaaaaattcagataaggatttatacaattaatatttatgatatcttttgtaaatttaattaattatagttacttcaatcatgattagtttataataataaagtgaaattgaaaaagacagctattatgcgatgagcgaaaaacttcaagtaaaacaagaatttaacggcgttacaaggcaatacttgaatttcagaacagatagtatcgatgatctggataagttcaaaaaagaattcaaacctgttatgcacttaaaaggtgatgcattcaatcaacagttacaatctttgattaacaaatatccacaaatacaaaaaaatatgaaatcagagttcattgcttattatgataaagaaaaaaatagagaaacagtaaaaaactatgcttggaaccttcaaaaatctataaatgacattatgcaatcatatcctagcacaaaatttgtacagttttataaagatgatgtttccccgtcaatggtagatggaaatggccgtttaaaatcggatactaatgtaatttccatcgagggaggaaagtatgatgagaacaaatgatcatataaccgatttagatgctattgagttaagtagcggttggaattacaattcgaaattggagactggcaaaaatgcactactatcagatagccttttaagagatattaaagtattaagttctaatgctaaaggcgacgctgacatactagaaacagaacttcgtgctgtaataaacgcaatgtctcaaaacgaaggtaaatctgttgatgcacttaaaaatagtaccgcttctctaaaaaacaatctaaccaaattaaaagagcaactcgacaaaactacacattaatttcatacattttgagtgaacagaattatatttccatagcaaacattcctaaactacacatacgttacataattgattcatttttatagaaacgggtaaaaatgataaagtaatcatctttcacaaaaaatcaaatattgggaggaattaaatatgattttgcgttacgcaacgaatttaaaacttgcgaaagagctataccaagccagtaaacctaaattgcaagaagataagggtatgattgaactgtttgaacatacttttggcttgcaaaaagaacttgtaaaatacgtcggcattgcagaagcaactactgctgctttatactcagctagctttatcaataaaaacatttctcgccttgcatcactatcaacgataggcattttaagtgtagctgcttacaaacatttcgaagctggccaaggtaaaaaaggtgcacaacatgcattaaatttattaggtcttgctactttaagtttactagatacattttcttgtaataaaaaatagtcttcattttagaagcacatactttagcacctgtgtacttttgattcaattcataaacggtataccgctatagcatgtgttttattatttttctggtctctttatcgtaaatattccccctaatttagcataatcatttccggctaaacgagaaacagcctgtaatgcgtgtggattgattttaaaatcaccctcataaatactgtcatcaatatgataagttacaatttcacctattattaaatcagccccatctaatacatctccaagcaatatcatttgcgatagtttacattcgaatctcattttcgcatctttaattcctggcgtcttaatcgttgtagatgttaaaagtgataattctgtacgactcaactcactgtcaccatatgctaacggcgctgcagtctcattaatatcttgaacattatcttcgtctgtaatatgcacaacaaagtctccagtccgttctatatttaatgcagtatcttttctcttacctcctgcacgttgaactgcaatagcaatcattggcggatgattattaacaatattaaaaaagctaaatggtgctgcatttactgatgcatcttgatttaatgttgtaacaaaagctataggtcgtggaataattgaaccaattaataatttatagttttctctagcagttaatgattgtgcatcaaacgtatacataatacctacctcttttctaagtatatctaggtatttctccgattttggttaatttaaacatctattctcctctgaaaatcacttgtatttatttagcaaatcttttgaaatatgacacatatgcatatcttctggatatttttccaaatgttgctgatgttcttcagcacttttaatgtagttagacagcggtaagacttccactgcaatttgatctctgtctttacgtcgttcaatgaactgacgcgcttcaattaagtggtcatctacacaactatataaacccgttcgatacttttctccaatatcatttccttgttgattcacactgtaaggatcaatgatttcaaataaataattcataatgtctgtaattgttaacatacgatcatcgaaatgaagtttgacacattcagcataaccatcatacggaccgtctaatttagagcttcttccatttgctcttcctgcttctgtatgtataattccaggtattgttgcaaaaaatgcttcaacaccccatagacaccctcctgctacataaacaactgccatatttacacctcatcatccttttttatatttttaacaaggttataccatttaataccgccatgacatgattctgatacaccttcattacgatacccatatttttcataaaatgaaattaatgattctcgacatgttaacgttacaccatgtcgatgatgattcttagcaagagtttcaaaatagtttagtaagcgacctgcaataccctgaccttgataatttggtgctacaacaagacctaacacactaatataaccaccttcactattatttgtggagacatttttaaataaatcatcgctaatgtaacgctcttttatgactggaccgttgatgtatccaattacttcatcattcttttcagctacaataaaagtttcttgaatttgttcaattctcaatttcaatgcctctggtgttgcagcttcttccggtgaaaaaccaatattttcaagtgcaataatttgatctaagtcctgcatgattacttttcttaataccataaaaacacttccttagccctatatatcaaaagtaataccttcatctttatattcattattttcaaactaccttcactataaaaaacgagtctttttattgaaagccattcgccttaatcaattagacaagttgtattatacgaattagtaaataatcatgattataattcattttaagcatactcaaaaagactggtacatgtataccagtctaattcgaaaaaatatatttagttaaaaccatttcaaaaacgacttcacttttcctggcttagtcggtctgtctaaataaacaaaattatcattgattactgaactggcatttcgaagtaatgcttcaatatcattcgaatatttcttcaatttatgattgtgaaataattcttgcatcaaaaatggtctttggtcacatgaatgtgcatctgaagctacaaaatgagccaaattacattctataaattgtaatgataacttttgaatgtttttaccaaatccaccaactaaagaactcgatgttaattgactcaatgccccatttgcaaccaattcatataatatttccggatttttggcgatacttctatttctttcaggatgtgcaatgattggtatgtaacctctcgattgtatttcaaaaaacaattgttttgtataatgtggtacttcgcccgttggaaattcaattaataaatatttcgaacgattaataccttgaatactaccattatctaagcctttcagaatcgaatctgtaattctaatttcttgcccgggaaataatttaatatccaatgcttgaacttctggatgcgttcttaactccgccaatttcacaagcacttgttgaaatgtattatcatatctcggatgcaaatgatgaggtgtcgctacaatacttgttacaccttcatccttagcttgctttaatagtgcaatactcttttcaattgttttaggaccatcatctatatcaactaatatatggttatgaatatcaatcatgattcatcagtcccataatatgcatagtaactagcacttttatctttaggcattctatttaagactacacctaataatttagcacctgttgcttcaataagttcttttccttttttaacttcatctttattattattttccgaattaactacgtagacaacattgccggtaaactttgaaaataattgcgcatctgtaactgtgttcactggtggcgtatcgataattacaaagttataattcatcaataatgtgtcatacaaatttgcaaatgcccttgatgtaattaactctgacggattcggtgggattggcccagacgtcaagacgtctaaatcttgaatttcagttgagataatactgtcttgataagttgaccaatttagcaataaacttgataggccttcattgtttggcaaattaaaaatataatgctgcgtaggtttacgcatatccccgtctacgattagtgttttataacctgcttgcgcatatgcaactgctaaatttgctgcaattgtagacttacctgcgcctggtgcctctgaagtgattacaatgctttgaactgcactgtcaggatttgcaaacataatatttgatcttatgcctcgaaatttctcgctaataggtgactttggttgttcatggacaattaaacttgatgtacttcttcgtgtattcgtcatggtaattcctcgtaaattaaaatttttgtattgaacctaaaataggtaatcctagttgcgattcaacatcttcttctgtcttaatacgcttatctaataattcttttaagaaaataatcaatattgctaaaacaataccaacaataatgctgataactaagttgacagatactattggagatacttttacagcattatcatgtgctgaggaaagtatcgtaacattatcaacactcataattttaggcatgtcatgagcaaaaactttagatattttattaacaattttgtcagattcagatttattcccagtggtaactgatacagtaataatttgagagtttgtttgattggttacttttaaaaatgaattcaactcagctgttgaatactgaccatcaaattctctagatactttatctagaattctaggacttttgataatttccgtatatgtattaacagactgcaaactactttgaacattttggaaagctaaatcacttgaggactttttcatgttcactaatatttgagtagaagcagtatatttgtcaggcataacaaaaaaggttaatgccgcacttactacaagacatattgccggtaaaataagcaataatttaatattcttctttagaatatttaatagttttactaaatcaaacttttctttcatggtttcctccacataatcaatcattgtattcattatgtatgttttataaatcggacaattatatctagtttaacgaccacaaaacatacacaactacattttctctaattatttatataaatattttatcgtttaaaattatatcatgattctctgccattatgtataacttatttatatttttgcacaagatataatattgtccaactttaaatatccaaacctattaataataaaactagataccatcgtactctatcatggctttcttataatcgagtagaagcatcatcattacttgattatttgctctttacaacaccgagcgtgcccgtactcggtaattcaataccttgcgtaacccgtcactgtgagttgggttaatgataataaagcccacaccttttaaaaagatgtgggtaatttatataatttttatttacatttttaacttataaaaaaaagcgcctatgtcatgatttaccatcacataggcgcttatcaataaattattacttattactttccatttcatctaatttatgcggatttcctgtaattagatgacaacttattcttttcaggggaacattacacttttataatatgttcaaagacaaacttaaccattcacaaatataaagaataatattatcaaatcattgaacaaatcgtattttgcaacaattgatatttatattaatgtattgcatttaatttataaaattcatatacatcttaatattctcaatatcgatttgtattgtcaactttatatagatttaaaaaaataatctcatgtctttttttacaaaagtaagttaattattacaaactagtaacaaaaattatttcttcaaaaatatatttagtagcgaatacacttcatctttgaattgacttttactttcttccactgctccaaatttttgcgaaaaggatgctttcaaataccaactttcaagaaacagcaatattaaattctgaaagtcttcttttgtcatctttatctttgattcatcatagaattttgctatctctttacttaatgattgatttaaatcttgtatttgtccgtaaatatttccagaaaattcctcaggcgtattagataattgaacgtacattctaatatacctttcttcgatgtcgaaaataaactcaaataagaattgatataaagcatcaattgaatagttcgatttattttgattcatcataataatattattaaggtaatcaaaacaacatttaacactttgttcgtaaatactttttttcgagtcaaaatggtaatataaactcgctttctttatatttacacttttagctatatcatcaagtgttgtaccgtcataccccttctctgaaaataaggttattgcgttatcaataatcttatccttcaatttttataaccccctactgaaaattaatcacactatgttacaggaaaattaagttgcaattacaaatatttccgtttaattataacaacaatctattgcaaattaaaatactatcaattaccatatggcttacaacctaactaacgaaaggtaggtaaagaaattgcaattttttaactttttgcttttttatcctgtatttatgtctatttactggattgtcggttcaatttatttctattttaccagagaaattagatattcattgaacaagaagcctgacataaatgtggatgaattagaaggcattacatttttacttgcctgttataacgaaagtgaaacgattgaagatacgttgtctaatgttcttgcactcaaatacgagaagaaagaaattattatcattaatgatggaagttcagataatacagcagaactcatctataaaattaaagaaaataatgactttattttcgtcgatttacaagaaaacagaggtaaagccaacgcactcaatcaaggtattaaacaggcttcatatgattatgtaatgtgcttggatgcagatactatcgttgatcaagatgcaccatattatatgattgaaaatttcaaacatgatccaaaacttggtgcagttacaggtaatcctagaattcgaaataagagttctattttaggtaaaattcaaacgatagaatatgcaagtttaattggctgtattaagcgaagtcagacacttgctggcgcagtcaatactatttcgggtgtctttactctatttaaaaaaagtgcagttgtcgacgttggctactgggatactgatatgattaccgaagatattgcagtttcttggaaattgcatttacgtggatatcgtattaagtatgaaccgcttgccatgtgttggatgttggttccagaaacattgggaggtctttggaagcaacgcgtgagatgggctcaagggggacacgaagtattactacgagacttttttagcacaatgaaaacgaaaaggtttcctttatatattttgatgtttgagcaaatcatctcaattttatgggtatatatagtgcttctatatttaggctatttgttcataacagcaaacttcttagactatacatttatgacatatagtttttcaatatttctactatcatcatttactatgacttttataaacgttattcaatttacagtcgcactctttattgatagtcgctacgagaaaaagaatatggctggactcatatttgtaagttggtatccgacagtatactggattattaacgcagcagtagttcttgtcgcatttccaaaagcattaaaacgtaagaaaggtggttacgcaacatggtcaagcccagacagagggaatacccaacgctaaaatcatcgctaaatattgtaagagaaacagcacttatcgctatatcttgtgtcttttggatatattgtttagttgttctactcgtttatattggtactatatttgaaattcatgacgaaagtatcaatacaatacgtgttgctttaaacattgaaaatactgaaattttagatatatttgaaactatgggcattttcgcgattatcatttttgtattttttacaattagcatattgattcaaaaatggcagagaggaagagaatcgtgaagtatagaaaattaataattttagtgttgagtatcttgatcatattgcctgtaagcacactggatggtcatcatattgcaaatgcagatgacgattcacctaaaaaactgaaatataaagaaaatagtgctctggcattaaattatcaccgtgtaagaaaagcgaattttctgaataatttcatttacttcttttctagtagtaaagaaattaaaaattatagtgttagtcaatcacaatttgaatctcaaataaaatggctaaaatcacatgatgctaaatttttaaccttgaaagaatttttatattacaagaaaaaaggtaagtttccaaaacgaagtgtatggattaactttgatgatatggatgaaactatttatgaaaatgcttatccaatcttaaaaaaatataaaataccggcaactgggtttattatcacaggtcatgttggggaagaaaactttcacaacctcgatatgattagtaaaaaagaactaaaagaaatgtataaaactgggttatgggaatttgaaacacatacccacgatttgcataacttatctaaaaataataagtcaaaattaatgaaagcttctgaagatacaatcataaaagatttaaacaaaagtgaaaaatatctaactaaaaactttaaaaagtcgcagaaaactatagcctatccttatggcttgatgaatgacgataaattaccggtaatcaaaaaagctgggttaaaatacggtttttcattagaggaaaaagcagtcactccgaactccaatgattattacatccctagaatattaattagtgatgatgcttttgagcatttaattaagagatgggacggattccatgaaaaagattagacttgagctcgtatatttacgtgccattatatgtgcaattattattgttacacatttattaacacaaattactttaaaacatgagaatatggagggaggatccttagtattacaattttacattcgtaatattgtgatttttggtacaccttgctttattatcttgtcacagttactgacaaccttgaattaccaaaaagtcacctatagatacttaactacacgcgtaaaatatatacttattccttacatattaatgggattgttttacagttatagtgaatcattattaacagattcaagtttcaataaacaattcattgaaaatgtcctattaggtcaatggtatggctattttatcgttgttatcatgcaattctttattttgagttatatcatttttaaaattaactataacctattcaacagtaaaatattattattgttatcttttattttacagcaatcatttttatattactttacgaacaacacagcgtttcacgataccgtgctacactattatccattaagtgaaaacactataatattcggatggattttttatttctttttaggtgcatatatgggttataactacgaacgtgtattaaatttcttagaacgttatttagttattatgattgtattagctgtagctacttattttgtgtttattgcgttagcaaatggagactattggaacgttaccagcttttcatattcattaacaccatacaatagtattatgtttattgttatcttgggtatttgcacgcattttaaaacaatgttatttaatacgattcaaatgattagtgctttctcattctttatttatttattacatccaatcattctagactcattgtttgcatatacaaatatatttgaggataatacaatggtctttctagcgatatcactactattcattttagggttatgtataggtgtcggtatgatattgcgtgaattctatatctttaggtttattattggaaaacaaccatataaattgaacattaatgcttattaattattaagctatgttaaaaacacgcggtgggcgaaatcagtttgaattgactgacttcgttttaccgcgtgtttaataatgttatacatatattctaattgcacatttaaacttcgtaaatgccaatgggagtgggacagaaatgatattttcgcaaaatttatttcgtcgtcccaccccaacttgcacattattgtaacctgactttccgccatcttctttgttggggccccgccaagatattacttgaataattcttttagaattctaaataatgatccgattaattgaaagaagtctgctgtcattgtatatacctccctttactttataaattatgcttgcttagtatcagtcaccttttcagttttcactaaatcgtctgctaaatgatgccaaaaatcttgtaattcttctcttgtgcgcactgtatcagaactgtcttgtcctacaaagtcaacatgatcccaatcatgttttgtaggcgtcacttgccaaatgcctttttgaattttatccgtcgcatttgtataagcttgattaaatggatgctgagaagaaataacggatactaaaccatcgttttctcgccattctttttcagtagctttaccgattaagttaccagtaatcacaaatgggaaaaacatatttaagtctgctttttgtctatcgctatttaatgctttgtgcgttgcttcaccagtgtatgttttatacacaatgttagggttcaacgacgttttacgatttaaatctgttgcaccctcacgcgtcagatcgtaaaatccattatcttttgatttccataaattagattgtttaacgcgtttgacataatcaatatatgattcatttggcttctgttttagaccccattgagccaacccgaagtctactcttgaatttttattaccaaacattttaccgatatcaaatacgatttgtctcactaaagcttcattaccagctaaatctgatgcgtgtgtaccattatgtggtgttcctaaagtagtaattgatgaaatcatattgtcatgattacctttgaatagtggagaaatttcgccaccatgtttcttttgatactctatttcttcacgattaccattacgcagtaattcttctagttgacgtatcgtttgaccacccatactatgtccaactaggtgtaccttctgtcctggtttccagtctttgtaaattccttcgtatgtttttccataacgttcatgtccatattttgctgcatgtgctgcaccataatctacacgaccgcctttgatataataataaagttcaactgcgcggtcatagttacttccaaaagcacttatacttgcttcataagctttgtaaccattttcttctaaatcttggcgaatgttcattttattaccgccccaataatgagctaacactgaaggattaatatcatctgtaaacccattgaaaccatgcactaaaacgataggatcttgatttttatactgcccttgtttggcaactttattcgtttgatcatctttcgcttttgcagtaagttcctttgtccctttgtttggtaacgttgctactgcactactttttaataaatttaatccatttttcttgtcattgtcctttgttggttctactggtgatttttgattgttttttaaatctgaaactgatagtgttttttcgtctttttgaggtttcacttcttgttcattgttaaaattgtggttagtaattttatcattcgcttgattattttgttgtggttgtactttctctatttctgtctcattaacaatttctcgttgacttgtttgatctaacttatttaatgatggtgcttcctttgttaaactttgtgaaggtagattgttattagcgtttgaatcttgactattatctgcctcttttgactgttgctgtgacgtcactttactttgtttgccatcattaatagcctgttctaacccttgatttacatcgctaggattagcattgttattttttgttgtatcacgttgaatatttttattattaagcgatgattttttatcatcctttagttgatctttattcaaatcatctgttttacgatgattttcttctgatattgttttatcattatgcaagttcttagttaaattttcagtatgttgctgttcgtcaacaccgttttcacgttgataattagcattttccctagtttgttgatccccaatagattgtgctgtaactgtatcctcctgtgaatttcccatattcacttgcttctcagctgcttgtgcttgtccaccacttaaaaatagtaatgtagctattaaaatggaagatgcacctacactaaatttacgaatactatacttattttgacttttcatcattgtcagcacctctatttttttattttagataaacaaattgataattattcgaggaataaactcaaataatttacttaaccaagcactcataatgaccatcctttctattgtttaatttgacgagaaagcgtttacatttgtatttaaaaaatatattctccaaagagaatttaaagtgtatacgctaatcatttcaaattattaattaatattatatttggcaaaatttaattagtcaataattagacacaatttaattatgcaaattgtaacttttttacatatatcttttgtgatttttaatatttacatgcttggggcttgattccaatgatgtattatttttttagattagctgtatgaggtgatttatgagctatcacagttataatgtttgctggtgtcgtattttaaacctaaaaatatcatcccatccacaataattgtatcaggataaaccgtaatacttgttcctaaactaaatatatacagttaattttcttccctcaaagtaagtatcctactattttaaatttattgtttaattactcttgaactagctttaacttaatctctgattagcataaaaatacaccccataaagttagttttttagtccaactttcgggatgcacatcttagttctaatggagattgtcttttaaataggctatgacatttctatttcaggctagatatatttttattcacagtataaatacaaagaatataatgacaactatgatattaaaggttactaaattctctttagctttttcgccattttttcccttcataacttcattatatcgattcatatacttttcaacatctttaacagtgacatctattcctgagttgctcaattcacttttcataattatttttggtttcgtattgtgattatccactacttatctataacgcgtttgcaactttagtaccatcacagcattcatagttaaaatatgttggtgtcgtattttaaacttgaaaatgtcacgttttccacaatatttgtaagtgtataagccatgatccttttctctatatctcagcccgtacttgttttaccactgttcgatattttgtcgttcgcctttaaagttattgcgcttatgatgtctacgcgctaattctgcctcaatttctgaaaaatcgacgcctagcgcatgcatcaagacaaataaatgataaagttcatctgctacttcacttacaaatgcttttttgtcacctttaattgcttcaattacgacttcaaaagcttcttcaccatattttttcgtaatcttttctataccttctgttaataaatattttgtatatgacttttcattattggattgggcactatcttgaactgtctgcgctaatgtttgcactgaaaatggaacttctgtgttgaaacaactttgactgcctgtatgacatgttggtccatttggtatgacatcaattaaaatagtgtcattgtcgcaatctacatgaatatctttaacaagttgcgtatgaccagatgtttcaccttttgtccatagacgttgtttcgacctcgaatagaaacatactacaccatcttctatcgttttatcaaaagctttttgattcatatagcccaacatcaatacttgttttgtttgattatcttgtaaaattgctggcactaaacctttgctaaaatcaattttatatttggtcatcttactgctatacccccttgccgtatcacttctttaatagattgaaccgtcgtttctcggtcatgtaatatacttgcagctaaacctgcagaaacatccgtctgatcaaataattctacaaagtgttgtgcattgccaccaccaccagaagcaatgattggaatatttacaagagacttaatatttgctaggtgttcaatatcaaatccttgcttcataccatcatgtcccatacttgtaacgaggagctcacctgcacctaactgttctacttgctgtacccagtcatatactttaatatttgtcatctttttaccaccatgcgtacaacaataatgtgcttttctttcaggatcataatagctatcaattgctatacagatgcattgtctaccgaatttatcactcgcttgtttaatgagctgtggattttttaaagcacttgaatttaatgatactttatctgcaccatgatttaacaattgagtaatatcatcgagactttgaatcccaccccctacagtaagagggataaacaagcgtgacgctgtctgttcaatcacttctagcattaagctatgaccctcttccgtcttagagatgtctaaaaatactaattcatcagcacccgcttcattgtaatacattgctaaatcaacaggattcccaatatcccttaatcctttaaattgaatccctttaacgacacgaccatctttgacatctaaacatggaatgatacgttttttaatcattttagcccctcccaaaaagatgcttgatgtgcagcctttcctataatagcagcgtgaacatttagcgacgctaatcgttgaatatcttgctgatgtctaataccaccggaagcaatgacaggaatcgtcgttgcctttactaattgaccagttaattcaaagttaggtccggacattttgccatctttagcaatatcagtatatataatgcctccaagaggtatatccgataactgactcacaaaactaaataaatttaactctgtgtcctcttcccatccgttcactttaatatcttctccataagcatcaactgacagataaatacgacctggaaatgtatgtgccatcactttaagccaatcagtatcttgaatgcctttcgttccaactatgcaataattaatccctgcggcaaagtagtccatgatttgtgacttcgtacgaatgccaccacctacttcaatatctttggttgttaatctcctcaatgacttaatataatcaaactctcgggcatgctgtgccttagcacctatcaagtcgacgatatgaatacgattcacacattcaaattgactatagtaagcaatactttcttcagccgagcgtgacattttttcttcactatcatatttaccctctgttaacctcacacttgttgacccaatcaaatcaatcgctggccataattcaatcatttataaatcccccttgtattgcctgacgcaaaatttgtaacccatatgtaccgcttttttcaggatggaattgaataccaatataattgttaaattgaacaattgccggaatatcagccccatactgcgcatatgcaatgacattttctgacatcggcgcttggtaagaatgtacgaagtaaacatcttgatttaacataggatgcttactcactaaattattccaacctaagtgcggcactgggtattctgtttggatacgcgaaatatttcctgggataaaccctaatccagatgcatcgccttcatcactatgctcatacattaattgcatgcctaaacaaataccaatcatcttcttatcagtattcttagccaatattgcattgagatttagtcgttttatctctgacatcgcatctttaaaatggccgacaccgggcaatatgattgtttctgcttgatcgattatttttgaggtatttgagacaaccacctcataccctaaatgttcaatagcgcgttttacattactaatattccctaatccataatcaacgataacaatcattcaatcacacctttcgatgacggcacacgctgatcatcagttgcagttagcgctatgcctaatgcacgggaaaacgctttgaatatagcttcaatttcatggtgtgtattacctccacgaattaaatcaatatgcgttgttaatcttgcattgattacgaccgctctaaaaaattcttctactaactccgtatcaaacgtaccaactttttctttacttaatgatgcattgaatgataggtatgggcgcccacttatatccacaacgacacgtgctaatgtttcatccattggaatgtacatcgttccataacgaacgaaatgctttttatctttaatcatttcaagtaacaattggccaatgacaatgccgatatcttcagttacatggtgatcatctacgtcaatatcaccttgtgcctcaatgtttaatgacagaccgctatgaaatgtaaacaatgttaacatatgatttaaaaagcccacacctgtattaatatgcgatggtgactggtcatctgatattgaaatatttagttgtgtttcagctgtgtttcgttgtttttgataaatcatattttgcgctccattctttaacaatttcttctaattggtttaactgtggtgctgttgcaattgagtatcttacatagcccttcatcaccggctcatcataaaagcgaggtttaaatccttgttcatatacgtattgtcctaattgttgcgctgctgaacctttagtaagtacaaaattggcatttgatgggaatactgacattttatctgcaacatgtgtatcaaatatttgttttaactgctcagctaactgtcgttgcatcgttaaaaatactcttgtctcttctctatgtctaaaaatataagtcgcaatatttagcgtaaatacatttaatggatatggatgttctattttttgaatatgctttatcgttccagcagtactaattaagacacctaatcttaagccggcaattccaaacgcctttgataatgtacgcattcttaagatgtgtggtgccagttccatgtcatatgccgtaccataatctaaatatgcttcatcaatgacaaagtatccgtttaatgctttcatcttatctgcaatagctgttaaaaatgccgtatcaaattgcttgcctgaagggttatgtggattactcataataaaaaatgatggttgtacttcatcgattttcgttaaaatggtttccaaatcaaacgttaaatctgatcctgcatctacaaatgcaatttcacgatttacttgtgccgcatatgcttgatacataaaaaaatcaggatttagcgttaatgccggaccttctggcatgatcagcattaacttttgaatcaattcatcagatccatttcctgcaataatttgttcaggcgataatccgtaaaacttagcataagcttccttgaattgttcatatgctgcatcaggatataaattatatggcgttgcactaataatagacgtcattgttttttcatccaacggcgtaactggactttcatttttatcaatataaatcatttcaattacactcccctaagactgacgtattaaaatagactgctggtgattgtataatgcttcaacatgagcaatatgttgtgctgaatcagcaatttgttcaaacgtatcttttgataaatggatgaccgtgttccgtgttaagaaatcattgaccgataacccattggtaaatctagctgttctatttgtaggtaatacatgacttggacctgcaacgtaatctcctatgacctctggcgaataatgtccaataaacaatgcacccacatatttcactttttcaatatatggttgaggatttactgtttgaatcgacgcatgttcaggcgcgattgtattcatgacatggcatgcttcatcaaaattactagcatggataagatagtgttgattagcgatacttttagaaacaatgtcgtatctgtccacattaggcaatgctttagcaatacgtgattctaaatctttaaggacttgcgcatcttcactaatgacatatgtacgtgctaattcatcatgttctgcttgcgcaaatacatcatatacgatggcatctaaatctgcggtgtcgtcaataatcagtgctatttctgttggtcctgcaatttgatcaatacctacctgtccaaataaatattttttggcatatgcaacaaattggttacctggacctacaatcttatcaactttaggtatcgtttctgttccataagtcaatgcagcaatactttgagcaccaccaacttgaaacacttgattaacttgcgtaatataacatgcagctaatacctcttgggatactccgttaggttgaggtggtgtcacaacaacaatattttctacacctgctacttgtgctaaagtcgctgtcattagaaccgttgatggataacttgctttgccaccaggcacataaatacccacactttctagtggatggtatatttcataacactccactgattcttctaactgttgattcgtctgtttaatactttcttgatatgctttaattctttcataactttgttgtaatgcttgttttgttttttcatctaatgtgtcaaatgctgctttaatttgttcatgactaatttctaaatgatctgttttcgtatgatcgaatgttagattatacattttcaaagccttatctccatgaactttaacttcctgacaaatatcgcgaataattggatacaatgactcatctaatggtgcttctaatgaaaattgatttaaaaattgttgtgcattaagcattggcaatagacacctccaaagagcgaataaattgctctattaattgtgattttttaaaataagctgctttattagttattaatcttgcattgatatcactaatatgttgcttttcaaccagtccgttcgcttttagcgtagtacctgtttgaacgatgtcgacaattccgtctaccatatctacaacacaggccaattcaacagagccattcaatttaatcaattcgacatcaataccttttgatttaaaatatgtttcagcagtatgaacataactcgttgcgattttacgataattggtcgtttcaggtttcgctgcaaccgcaaaatgacatgctccaaaaggcatattcaacaaattattaacattatattggcgctcatctaatatgtcgctaccaacaatgcctatgtcggccattccttgttccacatagattggcacgtcacttccttttactaaaatgcattcaatattatctacacttaataataattggcgttctctattttttaatgtttctgataatgtcgtaaattcaattgcatctaaatagttaattaaactatccattaaacgcccttttgctatggcgattcttaacattgtgcatactcccttacttaagtgttaatcctaatccaaacccttcgatgcttcctttgtaataaccacctgttaaaactcgagattcattttcagcaaaatgacattgaataaataagcctgtgtaataggatctaggtggctgcgcagtaatatctaaatggatgtctttgtaaccttgtgtatgtaaccaatgttcccatatttttaattcaacgagtgctggatggtcatttggaatatagtgttccaatacatttaattgttgttgcgtattctctttcaagatttgcacgattggatgttcagtcgacaaatatgtaactagtcccgataaattacgttcctcaatcattgatagtatgtctggtgtttgtaacgatttatcgagtaaggcatcaagcaattgataatgtcccaatacaacaaaatgcacgttgtctctcaactgctgttgaataaactgaataaatagctttaagctctgttgtacattcgctaatgatggtgcatagttttccaaacccacttgtacagccgcttcattattccgaatgattaaacctgtgtatgccacttttgttgctgcagttggatacattgagtaataacgcaataattgatctgtaaaatcatttcgaagtgcataaatttgatgctcatgttgccaaaaatttcgctcacccatctgctgcaaatcctcatggttcaattgtttccagtccaacttttcaaccacactaaaatcaactaactcataatccgctttattaaaatattttaaaaatgctgtttccgattcttttaacgcaattaattgttctgaattattcactcgaccaccctttactttcaatactgtatttaaaatcacttggtattttcgttgtttgctttacttctctactacactaaagtgtaatatgattaataacttatcatttttagcaatacattacaacctttttcagaaaattcggtgtattgtttttaaatttttacaaaagaaaaaggcaagacatttgtgcctataaaaatgctaaaccaagatttttatattgaagttgtacttcttgcacatattgtccttgccttattatgtaaagttattttctttctatctttttattaaatttaactattcttcataatcccgattacctttaaagaattgtctatcttgtttactatatacattttcaggattaaaaaacggtttgagtttatatttaaattcaaataagtttagaccatcaatcgcaaccctatcttggtaaacgttcgttgctgatatatctgtaaaattgtttggaccgacacctgcaataaacttaaactctgcttcatctaccaaataatcatacgcttgtgtatgtctatcctgtgcgccatgtggaaatacaaacatatctgttttacctacaattggttcaacttcatctttccatcttttagtatcacgtttaataccttctaaagatgttttttcaaaattaatgtgaccatatgaatgactcgcaaatgaccatccatcccgtttcattgcgcgaacaacttcctcagctgcctttttattctttgtataatctttactcgttaattcattcgtgcgataacctaatacgccctcataaccggttaaagcaacaacacccttttcaccatttaaagaaaaatctggatgctcttttacaaatttatttaaaattggcacgatatcattgtcatcagaataagtagcatggccttttgagtctgtcgtttcagatacaacatgtttatttttatcgagtactaaacggtcagcataaccatggtgtctcatgtaactatagtaattcatatcatcaattgagatgattagtggctttttacctttcggcaattttatttttttggcttttacatgatgagatgataagtcgtatacatcatgtggattaacgatgatgtaattatttttatataattcgttcaatgattttttaaattcacttacagtaatcatccaatcattgttgcccttagcttggtgtgtatctcctgtaaacgcaacttttggttctgtaattaatgggtgataaaacacatgataaacttggccgtgatatgtttcccaatgttcatccattttcgatttatgctttgcatactcatttggattaacagatttattttgagctttctcatttttcttggaacagctatatagcaatgcaactgataataacagaaaaaatagcaataaatattttttatgcattaaacattctccctatgttttattatgcacaattataacatttttattatgtggctcataactttttaagaaactgttgggattttaattttattttttagataatgtcatagtattttatttataaaacacaatatctccttgattgataatgtcgtccatagctttgtctcgcttgaatttaagcctttctgctaaatttattgaacgttggttacacttatttgtcctgataacttttactgtttcttgatcgatataattcacaaaatttgtgattgctgtaatagcctcacatgcgtacccttgtccttcaaaacttggatgtaatttataaaataaatttagtactgtttcttgctttaattgtcgatattcatatccacaaataccaataacactacaatctatttttttcaccaatacaaagtaaccaaattgatattgttgccaatggttttgccatttttcaatccaccgttgtgtgtctaatttggaattatgtaaacctttgggagtgtatatatttgcttgtggatgactacaaatattataaagttcaattaaatgcgaggaacttggaatcattaaatttaatctttcagtatttatcattaaatgtctccctcctatttctatttaaagactatttatatgaatactaatgccacgggttgaaatatcgactattatttaaaaagaataatgtaactactaacatcagaagtattaacgtcaaacacaaaacaacataatcatctttttttaattgttttttgacgtaccaggttctccttttatactgtccgaattgtcttaactccatagcagtactaatagtgtcaattctttcgatactagaaaatattaaaggtaacacaatgcgtttgatacctttaacacggctagtaaatttcgcttttttcgaattatcatatcctcttgcttgttgcgcttgtgaaatattaaaatatgtttcttgaatatctggaatataccttaatgctagtgagactgcgtaactgattttataattcacacctagctgatttaaacttgcagcaaaatgactcggattcgttgtgaataaaaatattaacgctaaaggaactgtactaatatattttaatattagattaaaaagatagaataattcctgtgatgttagcgtaaatcgaccaataccattgactaactctgtacgctgattataaatcttcacaccatattcagggtcaaatatgtatacggcaataatatttaatattgtgaaaaacagaatgaatttaacaacaaagcgaacttgtttccattcaatatgagcatatttgaacaataaaatagatgaagcactaattaaaattaaatatcttgtgtcataagtcaccattgcagaaatagaaacaactaataagaataaaagtttaacagtcgcatttaattgatgaatacgactatttcccgggtgaaaacctatagtattatattgattcattggcgtctcaccttcctatcatggtcaataaataattgtactaatttctgtggctcgctaatccctatatattcggccatttcaaatagcgatgtttgtctcaatgatgcaatctcacagatttttttatcatttaataccaatactggcgtggtatcagcaacgacttgtccttttgataatacaattgttcttgaactatactcagacaataaatgcatatcatgcgtaatcataataatcgtcttcccctgtctgtttagctcaattaaaaatgacattatctcattataatgatagaaatcttgaccagcagtcggttcatccaatatgattatttccggatttaagactaaaacagatgctatagtgaccctctttttttgaccatagcttaaagctgcaattggccaattccgaaatgcataaagtccgcatattttgagcacattctctactcgtatctttatatctgattctttcatacctcgtgctcttaaccctaatgctacttcatcgtaaatcattttttcagaaatcatatgatttggattttgcatcacataacctacgaattcagatcgttcgctaattgacaattgattaaatcccctattacaaaattggatattacctgttatatctaaaaatccacaaattgctttagcaagtgttgatttgccggcaccattgtgaccaactatactaagcatttctcttctataaacatttaattgaacattattaagtacactattactatagtcactatattgaacacatacctcatttaattctaatagcggttcagatttgtacttattatcattatttgcagatgtttcatctatccattttttcactttaaatttaacatgttcactcatacaaacgtcacgtaaattcgctaagttatcaatggattcgacatctacttctgcatatttaagcgctgtacagtataatggttcacgtatgcctgcttctttaagcttagatgattttagcaaatcactaggcgttgtattagcgatgatttttccatctttaaaaagaagaactctatcaaacgtatcatctaatgattcttctaatcgatgttcgacaataatcatcgttgactttgtttcttcatgaatattgtttaacaatctcagcgtttcatgtcctgtcgcaggatctaaattggccagcggctcatccaatattaaaataggcgtacgatggattaatataccacctaatgaaacgcgttgtttttgacctccagataaatcttgcggtcggtgatttaaatgttctatcatgccaactttttcagcccaataacttacatttttcttcatatcatcttgttcaacacaattattttctaataaaaaggccatatcttcagctgctgttaagcctatgaactgtccatctgtatcttgtaaaactgtaccaacaacattagatctatcatgtaaacaactaacggttgcatcttgattatttatatatagttccccggttatgttacctttagttttaaatggaattaatccgtttatgcaatttgcaaaagtcgatttgccactacctgaagcaccaactactagcactttttctcctggataaatatcaacatttatattctgtaatgtaggtgttgcttgactatgatattgaaaactaaagtctttgaacgagataattggttcagtcatgatatatcattacctttctacattcatttacatatctgattcaacaaaatgattattctttacgtaaactacctttttttatttgagatgaagcatatgcttttaataatattgtcccaataataccaactgaaataatatttaatactgcagagataacaccttgtgtataaaccttgttagccggttcgttataaatcaaaatatctaatgttggtgcaataagtgcccagcaaataatattcgcaataatttgaccgatattaaaataaatcatcgatttcctagaaaataggcctgaagaaagatttaattttaggccaatccatccatataaacagcctataattcctgaacaaataacccaactccaccaagcactaccgtatgtcgtgaaatctttaatagcgtgtccaactaatccagtcattaaaccagcaaaaggcccaaatattgcagatattaatgctaaaaatgcataagatgtttctatattcgtattaggaaaacctgttggtattacaacaaaacgccctaaaatcacaaataccgctgctcctataccaatcgcaacaacagttttaactgaaatatcttgttttttcatcttcattactccttacataaaaaattcattaaattgatggtgctttagataaatgaatcgtccaatcatttccagtaccaatatgatataaatctgaaaatgagtcttgattgactgctacaccaatatttactagcgagttaacatacacaagaggttcacccacattaacatctgcaaacgatcgcgcaaatttaataatattttgatagactttcttatcttgatgataaattgttaccaccaaattattaccatgaacaatttccaaggattttaagaatgccaatggaatatttgtccataatgacccaaatctgatatctaaaatatcaatgcttcctgtaacagaatcctcattttttgtcgcttctcttatttctaatgcctcaatactatcaacattaattgcctgaccgagacgttcaaacgctatcttatttgcagctaatctcgcaccattgtatgcataaacatctctaccatgaaaagtatgactttcttccgaatgaggcaatcggcttttcacttcatcaatttcgataacttttttaataccttcgtaatgtttaatatgacttaaagaaccattatcaggtgtaataatgtaatgacctgaatatgttaagcaagcaatgctccgcctatcactacctacacccgggtctaccactgatacaaaaactgtgcctttaggccagtattttacagtttgatataaacgatatgacgctacccaaatgtcatacggtggtatatcatgcgttaagttttcgacacgtatatcatcacttacagtatatgcaactccatacattgcacttacagcgccatcactaagtccaaaatctgattgcaaaaccaaataatttcccataaaatgcctccttttttaaaacttcaaaaaaatataatctacatatttaacgttctatattttgaattttcagaattatattaaaatagtacgagtcacttgatgcaaagtcaatagtagtgactataaaaatgataataatagtcagatttatctcattaactaaatttcacggacttgtaatcacttctttatgtttgaattaattgactagggtataacaatagtgtggtgttttataggtcattctttaaatacatcacagaaaatattcgaattcgaaataaaatgcttgcatctttgttttttaggtggtatcgtatgtatatcaagtataaaaaatatatctaagagataaaaatatggaggttttatattatgactaactttacttttgatggtgcacacagtagtttagaattccaaattaaacatttaatggtttctaaagtgaaaggttcatttgatcaatttgatgtagctgttgaaggagatattaatgacttcagtactttgaaagctactgcaacaattattccaagctcaattaacactaaaaacgaagcacgtgataaccacttaaaatctggtgatttctttggtactgatgaatttgataaaatcacgtttgaaacaaaatcagttactgaaaacaaagttgttggtgatttaacaattaaaggtatcactaacgaagaaacattcgacgttgaattcaacggagtaagtaagaatcctatggatggttctcaagtaacaggtattattgttactggtacaatcaatagagaaaaatatggcattaactttaaccaagcacttgaaactggtggagtaatgctaggtaaagatgtgaaattcgaagcatcagctgaattttcaatctcagaataatctcattacacaatcctcattgttttaatatatatacgaaatgccaactatatcatccctaggtatagttggcattttttaacctctaaattaaaaatcatatttaacttaattgataataacaccataaagtaacaatgatattgatgaaattaaaagtaatacactagataaaatatctagccttttatcttttttatcccttattctatttgtcaaaagtgctccaactgcaactaaaactagtattgtacaaaaaatataaatagccaaaataaacaactccttattaaattggcattggcttcattagaaataatcaagaaaattcttctttatactttcttatattaaatattgcctatttacgttatacaaaacttcattttacaaattgaagcaaattatatttaacttctaaattaaaaatcgctaagatttaaacttatatttagacgcctttcattcaggtaggtcttattgaaactgaaaactttggtgcccttttgcaaagccattaactgtataaagcatagatcctccgcccatttctatatcattggaacaaatgatgagttgatttgttctaggtataaattgcggatgagtagaacgtaacatatgcccttcatctcggcctggtatcaatatttgtcctattggataaccccttttattaaaaactaacactcgaccttgaccatacattgctacgtataaattatcgtcactatcaatacaacatgagtctggtccttcatgacctgtaaaatagtacggtatagtagctccaaatggttgtatcgtcacaccatcatcttcaagtgcaatgcgatgtaatcgattggctgtagtttctgttacccatagtactttttcatctgtacttaaagcaataccatttgctacgctaatattttgaatgataggcgtcactgttctaaagtccggcgaaacataataaacgcctcctagtggattggtagagtatcctctaaaatctgtaaaataaaatccacctttagaatcaaataccatgtcatcaatacaatatgctgttgaaagatcttcaataatatcttgtaagttgtcaccattttctgtagctgcaaaaatgcctcctgtagatttaaaatctcctaaataacaaacgaataatcggccatctttatgtattttgattgctgcaggattcgctttgtgacttacaaaaggtcgtttgatttccttcgtttcaggattgattttgaaaatattgccttcgaatacatccaataaaaagagttgtccctgccgatcaaagttcaatccttctagttgcaatccttttttggaaatttcaagccatggttcagctgtaattgtttgtaattcactttcagatataattggaacagcactattggacttcccgctataaaataatgtaggtaaatcttgttgtgacatcatgatcattcctttcatttcattcgttttaactatcatttacattttaaacaagataactatcaaataaaatgataacggtttcatttatctattttatcggtctagtggctgatttcaagctagaaatattgaatgacaatacaactctgttaaaatgatggacgtagataaatatgcgtattgacgctttattttaaaaattaacatgcttataacatgtttatagaaggagattaacctatgaactatcaagttcttttatattataaatatacgacgattgatgaccctgaacagtttgctcaggatcacttagcgttttgcaaagcacaccatttaaaaggtagaattcttgtttctacagaaggtattaacggcacattatctggtacaaaagaagaaaccgaacaatatatggcacatatgcatgccgatgaacgattcaaagatatggtgtttaaaattgatgaagctgaaggacatgcttttaagaaaatgcatgtacgtcctcgaaaagaaatcgttgctttagatttagaagatgacgtcgatccaagacacacaactggccaatatttatcacctgtagaatttagaaaagctcttgaagatgatgacacagtcattattgatgcacgtaatgattatgaatttgatttaggtcatttccgaggtgcaattcgtccaaatatcacacgttttagagatttgcctgactggattaaagagaataaagcgttatttgcagataaaaaagtggttacgtactgtactggtggcattcgatgcgaaaaattttctggatggcttttaaaagaaggtttcgaagatgtagctcaacttcatggcggtattgctacatatggtaaagatcctgaaacaaaaggtgaatattgggacggtaaaatgtacgtatttgatgaccgtatcagtgttgatatcaaccaagttgaaaaaacaattattggtaaggattggtttgatggcaaaccatgtgaacgttatattaattgcgctaacccagaatgtaataaacaaatattagtttctgaagaaaacgaaactaaatatttaggtgcatgctcttatgaatgtgctaaacatgagcgtaatcgttatgttcaagcaaataatattagtgataatgagtggcaacaacgtttaacaaactttgatgatttacatcaacatgcttagttttaattaaatacctttcaaaacacgctttgaaaatccgatttataaaggtttttcaaggctgttttttatgcgcatacataacctgatatgtttttaattatgcgcgtgttatactaaattaaattttaatactgcggggtgtcttaaaatgcacattttagtaacagggtttgcgccttttgacaatcaaaatatcaatccctcatgggaagctgtgactcaactagaagatattattggcacacatacaatcgataaattaaaactaccaacctcttttaagaaagtagataatattataaataaaacgttggcatctaatcattatgatgttgtactagctataggacaagctggtggtagaaatgccattaccccagaacgtgtcgccattaatattgatgatgcacgtattccagataatgatgattttcaacctattgatcaagccattcacttagacggtgcgccagcttatttttcaaatttaccagttaaagcaatgactcaaagtattattaatcaaggacttcctggagcactttcaaatagcgcaggtacatttgtttgtaatcacacactttatcacttaggttatttacaagataagcattaccctcacctacgattcggatttattcatgtgccatacataccagagcaggtcattggtaaacccgatacaccatctatgccattagaaaagatagttgcaggtttgactgcagccattgaagctatttctaatgatgaggatttacgtatagctctaggcacaacggaatagttataaatgcacaaacaaaagcaccctaatttgttagtttaagtctaactttagggtgcttttggatgattggtatacagttttactataatgatgtattttagctaaacgacattgtttagtcttctttttttaacttcctaaaatttacaaatgtataaataataaatgctatatttagaatgatgagtatacttactgaaactaaattaaaagtgtctggttctttactaaagatagatgctatccttgctatcaaacttggcaatgaaattaccaacacgatgagcgcataaattttctgtttaattaaaatacaagttccaataactaatattaaaaatgttatcccaataatgaaactctgtttgtcacttaactcaaagaaactatagataggatattttttaataatcaagccacctaaaatcatccataaaaatacgataattccataagtcacatttataacatatgttattttttggtcaccaaatcggactaatgtattgcgtagaatcagcataccaatgacaacacctaaaataacgatactagctatatacaataaaaatgcaattgtcacatcgaatgtacccaaatctaaaaacataggaattataatgactgctaaagcaaaagcgaagtacaacgtaatatatttatataaaccggtagtaagacttatctcaggtgataactgatcagccattgacttaatcggtgtattaataattgaacttgtatcttcgttatttttttcagccatagttaaatgatcttcgagctcttccaatagttcttctacttcttcttcagttttacctctaaataacaattcaacacgtaatttttccaaaaaatcttgagactgtttacttaacatcgttttcccctccaaacaagttaatcattcctttattcaaagcttgccattttgatttaaatacttttaattcctttaaacctgactcggtaatcgtatagtactttcgccttgggccaccattactagatttttttattgtcgtatcaacgtatccttttttgtttaaacgcattaaaactggataaatactaccttcacttatctctggaaactcttgattcttaagtttcgtcataatttcatatccatatgtttcgccttgggcaatgagacctaatattgccccatctaagagacctttcataatctgatttgacactgacattttcatcacctactatcttacattataagatagtacattgaggacttttcgtcaactatcttatattgtaaggtagttgttgtacacattccttaaatgactaacaactttgttaatagggtaatacttacggaagtatattttatttatgggggaggaattaataatgactacaaaaacagtatttgatgtcattgatatggggttaggatatttagtaaatgtgtatgatgcttggaaagttgaaaaggtacttgatgattatcataagcctttttctaataccattcattggcaatttgggcatgtattaacaatttttgaatcggccttagctgttgctggtaaagagaatattgatttaaatatctatagacctttattcggaaatggttcgtctccagatgaatggaaggatgaagtaccgagtattgaaaagattttagaaggtctccaaacattacctgaacgtgcacgaaatctaactgatgatgatttagcaattgaattgaaacaaacaattgtcggttgtaataacttagaagagttattagtattaaatgccattcacatcccacttcatgctggtaaaattgaagagatgtctcgtatattaaaaaatttaaaataaatatgtgcttattaaccgttaacaacacgttaacggggtttttatttgtttaaaaggtcacttttttaaatttaataaataccatctataccagttcttcaccgattctcgaaaaataattatattaatgatttcgttaatttaattttatatttaattattactgtacatcttttgtagttagctttattcttaaattgaaatatgtataaaacatagaaagaaggacgttttaacatggaaaacacggttaaatatcgtaagtttatactccctatcgttgtaggtctccttatttgggcacttacaccttttaaaccggatgctgtggatccaacagcatggtatatgttcgcaatattcgtcgcgacaatcattgcttgtattacacaaccgatgccaattggggccgtctctataattggatttacaatcatggtactcgttggcattgttgacatgaaaacggctgtcgctggttttggtaataatagcatttggttaattgctatggcatttttcatttcgagaggatttgtgaaaacaggtcttggtagacgtatcgcacttcatttcgtcaaattatttggtaaaaaaacattaggcttagcatattctatcgtcggtgtagatttaattctagcgcctgctacaccaagtaataccgcgcgtgccggtggaatcatgttcccaattatcaaatcactttctgaatcatttggttcgaaaccgaaagacggatcagcacgcaaaatgggtgcatttcttgttttcacagaattccaaggtaatttaattactgcggctatgtttttaactgcaatggccggtaacccccttgcacaaaatttagcatctagcacatctaatgttcacattacatggatgaattggttcctagctgctttagttcctggacttatttccttaattgttgtaccttttattatttataaaatttatccaccaactgttaaagaaacaccaaatgctaagagttgggctgaaaatgaattagcgactatgggtaaaatcgctttagctgaaaaatttatgattggtatttttgtcgttgcgttaacactatggattgtcggaagtttcattcatattgatgcaactttaacggcctttattgcgttagcattgttattattgacaggcgtcttaacatggcaagacattttaaacgaaacaggtgcttggaacacattagtatggttctcagtattagtgttaatggccgaccaattaaacaagcttggatttattccttggttaagtaaatccattgctacaagtcttggtggcttaagctggcctatagtactggtcattttaatattgttctacttctattcacattacttatttgcaagttctacagcacatatcagtgcgatgtatgcagcattactaggcgttgccatcgcagccggtgcaccaccattattcagtgcattaatgttaggtttcttcggtaacctattagcttcaacaacacactatagtagtggcccagcgccgattctattctcttcaggttacgtgactcaaaaacgttggtggacaatgaacttgatcttaggtttcgtctactttattatctggattggtttaggatcactttggatgaaagtaattggtatattttaaaatatttaaattagcgctcgaatctcattgatttgggcgctttttaatttgtatttaaaatcaacctttgctaaatcaagactccctttttaaaatacgtttatcctttaaatcattgcgtgcttcactaaaaatctatataacgctttaaatcattgcgtaacatcacagaaaatacatttctgtataaacgcgcttcgttgattaacattacgtatgccctcataaatcatgaaattaaaaacaccttcgtttaaattcattttaagtgcgaattcaacgaaagtgatttatttcatatttaatgtttcaaatttatacagctgtcgctgttactgcacacatacctcagtctcaccttatcatgacacaaaggatattgaaaacacgtataattatctttcctcgtattttatagggtttttgcgaccggatgtttcttcaatttaatgtattgagaaagactatataacacaatacctgtccaaataaatataaacgtaattaattgatctatattaaaaggctctttgaaaacaaatatgccgagtacaaacattattgttggtccaacgtattgaataaatcctattaacgaaagtggaatacgttttgccccggctgagaataggattagtggtattgccgtaatagcaccagaaaataacaaccaaaatgatgacatgttcaatccaaatgacatctgatgttgctgccataaataaataacgtatattagtccagcaggtgcggtaacaatacattcaatcgtaatactgctgatggcatcaatatgtactacttttttcaataatccgtatgtaccaaaggataacgctaatataatagaaacgattgggaattctccaatcttgagcgtcatatataatacaccgatgaatgcgaataaaatagctagccattcaaatttattgaatctttcttttaaaaagataagtgcgagcaaaatgctaacaagtggatttatataataacctaaacttgtttgtaggacgtgaccgttcgttacagcccaaataaatgtaccccaatttaatgtaatgacatagcctgctacgacaatcgctaatagctgaatgggcttgcctaacaattgattcatatctcgttgaaatgcattgcgttgtttttgtccaaccgcgagtatgaaaatcatgaatattgctgaaaatataatacgaaaggctaaaatttcaaatgcgcctatttcatcaacgaactgccaatatataggtagtattccccacagaatgtatgcactgagtgctaaaaatataccttttttatattctgtattcacttacatacctccttactctcccaaatttttaacatgttacgctcacttggttatgctaatataacgattttactaataatatttcgataaagatatcattttgtttatatttcccacatttattcaccaaccactaaacaatattaattttataaataattctgtacaaatcagggtatattgccagaaagactaccatacaacataaaggatggatacaaatgactttacctaaaattggaaagcctgcaacacgcgcgctaaattcacaagatatatacacattagaagcagtatcacaatatacgaagtcatctctaatggagatgcatggcgttggtcctaaagctatatcaatattggaacaagctttatttcagcaccaactacattttaaaacggaagttcagtcatcattaccttttaagttaacaggagatgtgtcatgcaatcatgcgcctaaacgtcaacaaatgatagattttatagttgctacagcagcattagatattgaattattacgttcactggttacaacagaatttatttggtctgtccctggccgctttgacatatacggacctcaaatattaattcaagaactatctaatcattacaatcaggttgctagtctcaatatccattccagcatcacacatgggtgcttaggttccatgcatggtattgaaatattaaaaactggtaaagagattcattttgctcatttttttgaatttgaaaatcataaaaaggatgccaagttaagcaaagtgacatcttacattgttgttgattaatgtatcaaattatatatatcgcaaaaaattattttgctgttacatatatatttttatataacaaataattttgtataacatttttgttatatgaacacttattactagagtgcacattgaacatacagtatgattaaatatcatgttatgaaagaaggatatattttgactgtttttaaaaatgagcgcttaagctggttaccatacatagctattgtcattttgttacacgttattgggtttagttttttatggattgctggaaaagaccatcatatcttatttggtatggggattcttgcatatacattaggtttacgtcatgcatttgatgctgatcatatcgccgcgatagataatacggttcgcaaattattacagcaacgcaaagatccatctggtgtgggtttctatttttcaattggacattcatctgtcgtatttttaatggctgtttttttaggggtatctgtaaaatgggctaaagatgaattaccacatttccaagatattggtggaacgattggtacactagtttcaggtttctttttagtgcttatcggtgtgttgaatctaattattttaatctctttaattaacttgttcgctaaattacgtcgtgaacacattgaagaagctgaagtcgatgcattacttgaatctagaggatttgtttctcgatttgtaggaccttatttcaaattaatcacgcgtagttggcacgtattgccacttggctttttatttggacttggttttgatacagctagtgaaattgcgttactcgctctttcttcaggcgcatcacaacaagccatttcatttatcggaatcttatctttaccaattttattcgcatcaggtatgagtttattggatacattagatggtgttgtaatgaagtatgcctataattgggcattcttcaatcctattcgcaaaatctattacaatataacgattactgcgatatcagtcatggcagcattagtgattgggatgattgaattgctacaaattcttgctgataaactagacttacatggtgcattttgggcatttattagttcaatcgaatttgattatttaggctatattttagttgcattatttttaattacttggcttatttcaagtttaatttggaagtttggtcgcatagaacacaaatggtctaaataaagtaacttgtcttgcaactacctttgtattgttgcatttttagacaccctgcacacttcttccattatgctacgctctcagtagtcatctttaaatcgtttcttttagagataacttcattttgagagcgtatttttctatttaaaatgtatttatccaaaattcaatgctttcgaatttaaaatttcagtatttctgtttaaaatttaattataatctttaatacaggaggcgctatgcttatgaatattgcgaagttagagaattatttacaaattgattcatctcgttataatcgaccgagtattgaagcattaaattattatgcaacacgttttatgttaactgtaccttttgaaaatattgatgttcaaaatagtaagcctatatctataaatatcgatgcactttttaataaaattgttcatgataaacgtggtggtttttgttatgagttaaatacatttttcaaagcctatttacaacaaaaaggatttaatcctgcattaatgtcagctactattcacacacccggtggcggtcgtagtctgaacggttcacatgcttcacttgttgtttctataaatgatgtattctatgtaactgatgttggctttggagacttacctctacatgccattcctattacttcatctgagcatacacaaccaattactgatatcagtggtacattccgcgctatttttaacaacgaagacaaggatattttctatgttcaaaaattcgaaaatgatcattggcatacaaaatatgaagctgaattcaaacctaaacaaatagaagattttaatagcaacatcgaatataatcaaacgcatccagattcaatatttgtacagcatttattaattacaatgccacaatcatttggccgtgctacaatgtctgaaaatcatttaactttaacaaggaatggtagctcagaaaaatttgatgtcactaaagataactataaacattttttagaaaaatattttggactaaatgtaactattaatcgtattgaaaaacaataatagtaaaatataaaaatatgggcgtatcttacttattgtaggtagcgccccttttttatgcttcataaacacaacaaaaaggatatgacacaaacttcatgtcacacccttcttttgaaccgcttcattttacttaagcaagtgcatctacaacataaatgacacctacgaatacaaatgcaatagcaatcatcgtcgaaataaagacgatacccattaatggattaaataataaaatgacaccgaaaacaatacctaataaattaaaaatcactgaaattagttttaagctaccactacccgtaaacgtaaataatcctgcaatagaactaaaaatgaaccagaatgcaaacatgtagataaaaaatgccgagctagcgccaacattaaaaatgacaataagaccaaagagaatatctacaatccccataaacagaatccaattttggttaccacctactaaagcttttgcttttctacggtaaatgatttgaatcacaccgttaattaatacaaacagtccaatcaaccaggtaatagcataaaaattttcaattggaaatgtaaaaataacgactgccaacattaataataatacacccattattaaactagaccatttaataccttggtttccttttgccataacaatcaattcctttcaaataaagccctcttttaatttttacaaaaaatttattatacaataattaaattcccttttctcaatttacacaaacatcatcacttagaaagcaccattgcttttgtctaatatgtacgatgaatctgtatcctcactcaaaaatctactacgtagcgatagctttcaactctgtaaggttcaaacattgaattgtaagtttagataaaggctactactccaaacattatttaaaatgaaattaaatacaaaaggagtgagactatgacaatattatcagtgcaacatgtttcaaaaacatacggtaaaaagcacacatttcaagcacttaaagatattaactttgacatacaaaaaggcgaattcgttgcgattatggggccttctggatcaggtaagacaaccttattaaatgtactaagttcaattgaccaaatttctagcggtagcgtgattgctaacggacaagagcttaataaacttaatcaaaaagcacttgccaaattccgtaaagaatcattaggtttcatcttccaagattacagtattctgccgacattaactgttaaagaaaacattatgttacctttatctgttcaaaaaatgtcgaaggcaacaatggaagaaaattacaaagcgatcacgacagcattaggtatttatgacctaggaaataaataccctagcgaattatctggtggtcaacaacaaagaactgcagcagcgagagcatttgttcacaaaccacaaatcatatttgcagatgagccaacaggcgcactcgactcgaaaagtgcaaatgacttattacaacgtttggaagaaatgaataaatcgtttgatacaactattgtcatggttacacatgatccggttgcagcaagttttgcagaacgtgtcatcatgctaaaagatggccaaattcatacacaactttatcaggaaggacgttctaaacaggccttttatgaagacattgtacatcttcaatcagtattaggtggtgtctcaaatgacatttaaccatatcgttttcaaaaacttacgccaaaacttaaaacattatgcaatgtatttattttcattattttttagcatcgtcttatatttcagttttacaaccttacagtttactaaaggtgtaaataatgacgactcgatggccatcattaagaaaggtgctttagtcggatcaatatttttatttatcattattgtcatctttttaatgtatgccaatcatttattcgtgaaacgtcgtacacgtgaatttgcgctatttcagttgattggtttaacacgacaaaacattttgaaaatgttagcacttgaacaaatgattgtatttttaatcacaggtgttgtcggtgtattatgtggcattgcaggtgcacaattattgctttccatagtatctaaattgatgtcgttatcgattaacctatcgatacatttcgaacctatggcccttgttttaactattttcatgctaattattgcgtatgtactgattttatttcaaagtgctttatttctaaaaagacgtagtatcttatcaatgatgaaagattcaattaaaactgatgccacaactgctaaagtaacgactgcagaggttatttcaggcgtattaggtattgctatgattgcaataggctattatatggcgacagaaatgtttggtacgttcaaagcactaactatggctatgacatcaccgtttatcattttatttttaacggttgtaggcgcctatttattcttcagaagttccgtgtcacttatttttaaaacattgaaaaaatcaaaaaatggacgcgtatctattaccgatgttgtattcacatcgtctattatgtacagaatgaagaaaaatgcgatgtctttaactatcattgcaattatttctgcagttacagtaactgttttgtgttttgcggcattatctaaatcaaatacagatcaaacccttacatctatggcaccaaatgaatttaacgtggtcgctactcaagatgctaaacaatttgaaactaaactaagccaacaacaaattacattttctaaaaatgcttacgaaactattactgtagataatgttaatgatcaggttattactttggaaaatggtagtgattcaggtcgcacgaattctattttaagtgcaaataacaagttaacaggcaacaatgccatcattacaaatacaaaatcgctgcctaacgtgattaatattcatttaaacaaagatttagtagtaaaaggtacaaagaatgagactttccgtgttacacaagaagacaaagacaaggtttatcctttaaatctaagcttcaactcacctgtcatcgaagtaagtcctgaaaagtatcagcagttgaaaacacaaaataacgttcatactttttatggatatgatattaaacaaacatcacaaaaggaaaaagctcaagcaattgcaaaacagtttggagacaaagtcatcacttatgatgaaatgaaaaaagaggtcgatgctactaacggtattctaatatttgttacatcatttttaggattagcatttttagtagcagctggatgtattatttatattaaacaaatggatgaaactgaggatgaactaagtaacttcagaatattaaaacgcataggctttacgcatacagatatgcttaagggattattattaaaaattactttcaacttcggtttaccattattgattgctatattacatgcagtattcgccgcaatagcatttatgaaattgatgggtaatatttccttcatgccggttattgtagtaattgttgtatacaccctcatttacattacttttgctttaattgcttttgtacattcaaacaaattgattaagaaaaccatttaacacttgtgattaaaagatgcttcattgagattttgattttaagcaatgcagtataactattaattgatttataaaaaaggagagattgaatcatgaaatttagagaattagtaaaacaatcatatgaggatttgaaaaatttgactgtaacttggtataacgtcattgctttaacaatacttgttattgtattaagctcattcacaacaccaatgataggcattccagctggtttattaggtggctcttattatttaaaacgtcgtgaagaaaaaggcaagtaagcacattccatcggtatagaacattgctatgacctttcaagtcagattttaatatcaacaagtagcgtttatcgctgcttgttttttatggattgcttataaaatcatcatgtttaaacgatatgtcactttgaaaactagcaaacaccataaaagactacaatttttttatttttataaacccctttaaatcaacgtttctaaggtttttaaaaatcttttttaatttattttcaaaaaacactgtacattatgccaatatgagcgtatagttggtcttacgtaataaaagctcgtgaattaaattgtagtgtatttgtttagaatatcctcttttttagttatgaatttgttacaaatattaagtgcaaaagcacatggaggttttctatatgaataacggtacagtaaaatggtttaacgcagaaaaaggttttggtttcatcgaacaagaaaatggcggagacgtattcgtacatttctcaggtatcgctagcgatggctacaaaactttagaagaaggtcaaaaagttactttcgaaatcactgaaggtcaacgtggagaccaagcagttaacgtacaaactgtttaatcttacaaaataaaacgactcattataaatgaatcgctttgattaccaacaaggttctaaatcttgttggtatttttttatgctattttggataatatgaggccataccgcgatcatttataaaaacttatttgccagatacatactaatcaaagctataagaatgattgcaccaacaaatgctatgaaagaaagtacacctgtttttatatttctagctttagtcgtttgtacttcactaggatcttttccattcataaaagcaacaattcgatcatagttatccattttatgcacttttttaaagtcttctattttcatagctgcataataacctattccataaatgactatcaccgttataccccaagcccaattccaataaacaattaaaggtcctgttaaaattgcagctaatgtcatgaaaataagcatcacatatgtccataagttaagacttcgttgcgctttaatatcaggtacaaatggaatggtcccttttactaaatcatctaaagttacattgaacaattcgcacatcattaataagttatgtatgtctggtaagcttttgtcattttcccaattagaaatactctgcctagatacatataacttttcagcaagatattcttgtgaataaccatctcgttccctatattttttaatttgtttactcagattcaattacatacgcctccattcaattagtacaatcattacaatcagactatcagataaagttaaatcaagtcacctgtatgattgactaaatgttttgacatacgacaacatcggggttcgaagactcccttaagacagacctgtataattacgcgcttgtaattttctcaatgccaacttgaatttcacttattaatgatgcaacttttccatgctattcaatacttgcgaagttagtcctatttaagagattacgttcacactatttactattcgattttccagctttccaactatgcttttctaatcttttttgtgctataaattctactgcttcaaaaatacatactgcactgatgaaccagcttaggaaaccaacaacaatgctaatcaaccacatgtgcgtcatatgtaacatcatccatgtaactaaaatacaaactaatacccctgtcataccaaacactgcgccacgacttacatgcacagcgactttatcaccatattgcatacctgtaataaacatagacactaaaaatactgccggaaacgttgcaaatataccgccaaattctttccaaggtagtgttacagatacaatataacttaataatactgcaaatccccccacaaaaaatttcattaatgttaatttcatgatgttctgcctccaataatttattacttaataactgaatacaactaattatcacgcattttccaaactataaatgtctaatactgaatattgcgagggaaataacaaaccaacaaacaaccgtgaatattgcgcctttccgataacctttatgcttaatgtagagagatgtcaaaaatacagttaatatacaagacagaataccgacaattgctccagtactaagattcatcgacatctccactaattgcgtaccacgatgatctaaagctaatgcgataatagccgcaagaaagactgccggcatagtagctataatacctcctaacttaccacctaccttatcagcaataattgaagctaatgcaacagcgataccaccaatgacaaaatgaagaattgcacttccaattgaaaacatcttcaacgtacctttctataattaattcaatacaaaacgtatcattcacacaaagtgtaaaacttaaattttctactgtaaaggcaactcaagcgatgttcataaagctttcatgatactttcataaactagcaataaagggttcaaatgaaagtatatccagctcaaattattgaaaattaccattaactgtaattttcaaatcaacatataaatataaatttttatgtttcacgtaaaacaaaaaaaagacaaagctgttatgatcttagctttgtcttttatgtgttagtcatcatgtatacgacatcctactactaacgtttatatattcgaatttttatttcataataatcttcatgatctttgtctttatgctcaacatgtaatcctgtttgttgaatcgcttggatacttttgcctacctcatctcgtgcttgagtgacatcttgtgcaaagcgaaggttttgtgctttgactttttcgggccccgttttttggcgtactctatcttcagtctgtttcacatttagcttttgtgcaatgacttgctcaatcaacgcttcttgttcgctatcagacaatgataataccgctctcgcatggcgttcagtaattttaccttctcttaagcgaagtagtactttcggcgccaacttcaataaacgcaacttatttgcaataaagctttgacttttacctaaactttttgccaattcactttgcgttgtatcaccaatttccaataatttcttataggcttccgcttcttcaacaacagacaaattttctctttgaatattctcaattaatgcaacaacagccgtctcttcatcatccatatcacgaataataacgtctgcttgaggtaaatttagtgattgtattgctctaaatcggcgctctccagcaataatttcaaacatatcttcttcaatcggtcttacaacaataggttgtagtaaaccatgttcatgtattgattcagcaagttctttaattttatttggttcaaacacctgtcttggttgataacggttgggaacgatacgttcaatttgaatggattcaacattactattgcgatcttcttcaatatgtccaatgatgtcatctttgtttttcaaaccaaataattttgaaaaaggttttttcattatccattcgctccttttatgttagttgtaaaggattatgcattatttttcaagtaaaggagtcttattaggcgtccctggttttcttggatactttttcggcgtctgtctttttttatcaataatgaacatctggcgctctccagcatcttctggcaattcgaaagtatgtgtttctgtaacattaccacctaacacactaattgcaaattttgcttcttctaattcttcttcaccttttgaagattttaatgcaacaaactgtccaccttttttaactagcggtaaacacaattcacttaacacggataatctagctactgctcttgcagtaacaacatcataagactccctgtagacacccttaccaaatgtttctgctctatcgtgtataaagctgatatcctgtaattgtaattctgacgctaaatggtttaaaaattgaatacgcttatttaatgaatcaacaatcgtcacttttaactgcggaaacattatttttaacggaatacttggaaaaccagctccagcgcctacatcacatatacttataggctgattaaaatcaaaataaaaactaggtgcaatggaatcataaaaatgtttcaaatatacatcgtgttcatctgtaatacttgtcaaattcatcttttcattccattcaacaagtaaacgataatatgtttgaaactgttgtttttgagtctcagttaattgaatattatgttcttttaattgttctgctaaccattctacagtcattagtcactcaccctttggagtttaccttgttctaagtaaatcaataatatagatatgtctgctggatttacccctgatattctagaagcttgtgcaatatttaaaggttttacttctgataatttttctcgcgcttcagtcgccaaactatcaatcttactataatctaagtcttctggaattttcttctcttccatacgcttaactttctcaacttgttgtagtgatttattgatataaccttcatattttgtttgtatttctacttgttcttcaacatctgcattcaattgatgttcttcttctaaaatttctaaaattatatcgtaagtcatttcaggtctgcgtaataaatcgatagctaaaataccatcttttaagcgagaaccaccatgttgttcaataatcgcttgcgtatgttcgtttggtttaatacgaatatctgataaacgcttaatttccgcatcaatttgctgacgtttttcattaaaacgtgcatatcgttcttcagaaatcataccaagttcatatcccatatccgtcaatctcaaatcagcattatcatgacgtagtaacaaacgatattctgcacgtgatgttagtaaacgataaggttcattagtacctttagttacaagatcatcgattaagacaccaatatatgcatctgaacgacttaatatcttttcgcctgtgtttaacactttacctgcagcgttaatacctgccatcaatccttgtcctgctgcttcttcataaccagatgtaccattaatttgacctgcagtatataagtttttaatcattttcgtttcaagtgtaggccataactgcgttggcacaatcgcatcatattcaattgcgtagccggcacgcatcatatctgctttttcaagacctggtatcgtctctaacatttgacgttgcacatgttcaggaagacttgtagacaatccttgcacatatacttcatttgtattacgaccttcaggctctaagaaaagttgatgtcgcggcttatcattaaatcgaacaaatttatcttcaattgaagggcaataacgtggcccggttcctttaatcatccctgaatacattgcagatagatgtaaattatcatcgataactttgtgtgtttcagcattagtatacgttagccaacatggcaattgatctaatatatattctgttgtttcaaagctgaatgcacgacctacatcgtcacctggttgtatttcagtcttcgaatagtcaattgtttttgaatttacacgcggtggtgtacctgttttaaaacgaacaatatcaaagccaagttctcttaaattgtctgataatgtgattgatggtaattggtgatttggtccacttgaatacttcatattacctaaaatgatttcaccacgtaaaaatgttcccgttgtaataattactgctttagataaatactctgtaccaatatttgtacgtacacctttaacttcattatcttctataataagttcgtctaccataccttgcattatatgcaaattttcttcatcttcaatcacgcgtttcatttcttgttgataaagtactttatctgcttgcgctcttagtgctcttacagcaggtcctttacctgtatttaacattctcatttgaatgtgtgttttatcgattgtttttgccatttgtccacctaaagcatcaatttcacgaacaacgatgcctttagctggtccacctacagatgggttacatggcataaatgcaatattatctaaatttattgttagcattaatgttttagcaccacgtcttgcagatgctaaacctgcttctacacctgcatgtcccgcacctataacgattacatcatattcttgaaccacaatataaacctccttatttgatatcttactagccttcttaagacggtattccgtctatttcaattactatttacctaagcagaattgactgaataactgatcgatgagttcatcacttgcagtctcaccaataatttctcctaatatttcccaagttctagttaaatcaatttgtaccatatccataggcacaccagattctgctgcatcaatcgcatcttgtatcgtttgtcttgcttgttttaataatgaaatatgtcttgaattagaaacataagtcatatcttgattttgtacttctccaccaaagaacaaatctcgaatttgtatttctaattcatcaataccttcttgttttaacattgaagtttgaattaatggcgtatcacctatcatatctttaacttcattaatatctatgttttgctctaaatccattttattaacaattacgattacatcttcatttttaaccacttcatataatgtgtaatcttcttgagtcaatgcttcgttattgtttaatacaaataaaattaagtctgcttggctaagagcctttctagagcgttcaacaccaatcttctctactatatcttctgtctcgcgtataccagcagtatcaactaatcttaatggcacgccacgaacattgacgtactcttctaagacatctcttgtagtacctgctacctcagttacaatcgctttattatcttgtattaaattatttaacatcgatgatttacctacgtttggtttaccaacaataactgtagataaaccttcacgcataattttgccctgcgcaccggtatctaataaacgattaatttcctgtttgatttctttagactgctctaaaagaaattcagtagtcgcatcttcaacatcatcgtattcaggataatcaatattcacttccacttgagcgagtatctctaatatagattgacgttgttttttgattaagtcacttagacgaccttcaatttgattcatcgcaactttagaagctctatctgtcttcgagcgaataaagtccataactgcttcagcttgagataaatcaatacgaccatttaaaaaggcacgttttgtaaattcacctggctcagccattctagcgccatatgtcatagtaagttccagcactctattaatcgttaaaataccaccatgacaattaatttctataatatcttcgcgtgtaaatgtttttggcgctcttaacacagacaccataacttcttcaaccacttctttagattctggatcaataatatgaccgtaattaatcgtatgtgatggaacatcatttaaaagatgttttcctttatataatttgtcagcaatttcaacggcttgcggtccagacaatcgaacaattccaattgccccttcacccattggtgttgaaatactcgtaattgtatctaaatccatattgctactcgcctccttcaacgatgtgaatacattttaaagtaagttattataaccctaaggtaagtcttacgtttgtctgaggtaagacttcgggaggtgttgagtggttaatgtttaccttcccctaccctatcattacttaatttttttattaaaaactttggcaattttaagtacgtgctcaagactattctgtatttgtaaagtcgtcatatctttagctggctgtcttgctattacaataatatctttggccaatatatgcgacttatgtactttgaaattttcacgtattgctcttttaatcttgtttcttaacactgcattacctagttttttagaaacactaatacctaagcgaaaatggtctatttctttattattacaagtgtatacaacaaattgtctgttggctacagaatgaccttttttatatattctctgaaaatctgcattctttttaattcggtaagctttttccaataacatcactcgcttatttatcgtttttatttgaagctatatttaaacttctattgagcttataacataaatttctatttattcttaatttaaacgaaaaaaaagatcactgatgagtcagtgatcttatgcagataaaactttacggcctttacgacgacggcgcgctaaaactttacggccattttttgtgctcatgcgttttctgaaaccatgaactttactatgtttacgtttatttggttgataagtacgttttaccatgcaaaacacctccatctttatacagttatctaatataccagattatgcagactctgatcactttaatagataagattttgcgtttcttagattaaaattctcgtattagctcattgattatctagtcataattcaagcaactactacaatataacaaaatcctatttataacgcaagttcattttatactactgctcaatttttttacttttat
